(19) United States
(12) Patent Application Publication
(10) Pub. No.: US 2022/0372489 A1
(43) Pub. Date: Nov. 24, 2022

(54) PPM1A INHIBITORS AND METHODS OF USING SAME

(71) Applicant: QURALIS CORPORATION, Cambridge, MA (US)

(72) Inventors: Sandra Hinckley, Sudbury, MA (US); Duncan Brown, Berkeley, CA (US); Sudhir Agrawal, Shrewsbury, MA (US); Daniel Elbaum, Newton, MA (US)

(21) Appl. No.: 17/621,320

(22) PCT Filed: Jun. 19, 2020
(86) PCT No.: PCT/US2020/038703

§ 371 Date: Dec. 21, 2021

Related U.S. Application Data
(60) Provisional application No. 62/864,988, filed on Jun. 21, 2019.
(60) Provisional application No. 62/871,356, filed on Jul. 8, 2019.

(51) Int. Cl. C12N 15/113

(52) U.S. Cl. CPC C12N 15/1137; C12N 2310/11; C12N 2310/315; C12N 2310/341; C12N 2310/346; C12N 2310/3515; C12N 2320/11; C12N 2320/31

(57) ABSTRACT

Disclosed herein are inhibitors of PPM 1 A, including PPM1A antisense oligonucleotide sequences, and methods for treating neurological diseases, such as amyotrophic lateral sclerosis and frontotemporal dementia, associated with decreased activity or expression of TBK1. Also disclosed are pharmaceutical compositions containing a PPM1A inhibitor, including a PPM1A antisense oligonucleotide, useful for treating neurological diseases and manufacture of medicaments containing a disclosed PPM1A inhibitor, for example, a PPM1A antisense oligonucleotide, to be used in treating a neurological disease

### CROSS REFERENCE TO RELATED APPLICATIONS

[0001] This application claims the benefit of and priority to U.S. Provisional Patent Application No. 62/864,988 filed Jun. 21, 2019 and U.S. Provisional Patent Application No. 62/871,356 filed on Jul. 8, 2019, the entire disclosure of each of which is hereby incorporated by reference in its entirety for all purposes.

### SEQUENCE LISTING

[0002] The instant application contains a Sequence Listing which has been submitted electronically in ASCII format and is hereby incorporated by reference in its entirety. Said ASCII copy, created on Jun. 17, 2020, is named QRL-001WO_SL.txt and is 821,932 bytes in size.

### BACKGROUND

[0003] Motor neuron diseases are a class of neurological diseases that result in the degeneration and death of motor neurons—those neurons which coordinate voluntary movement of muscles by the brain. Motor neuron diseases may be sporadic or inherited, and may affect upper motor neurons and/or lower motor neurons. Motor neuron diseases include amyotrophic lateral sclerosis, progressive bulbar palsy, pseudobulbar palsy, primary lateral sclerosis, progressive muscular atrophy, spinal muscular atrophy, and post-polio syndrome.

[0004] Amyotrophic lateral sclerosis (ALS) is a group of motor neuron diseases affecting about 15,000 individuals in the United States of America. ALS is characterized by degeneration and death of upper and lower motor neurons, resulting in loss of voluntary muscle control. Motor neuron death is accompanied by muscular fasciculation and atrophy. Early symptoms of ALS include muscle cramps, muscle spasticity, muscle weakness (for example, affecting an arm, a leg, neck, or diaphragm), slurred and nasal speech, and difficulty chewing or swallowing. Loss of strength and control over movements, including those necessary for speech, eating, and breathing, eventually occur. Disease progression may be accompanied by weight loss, malnourishment, anxiety, depression, increased risk of pneumonia, muscle cramps, neuropathy, and possibly dementia. Most individuals diagnosed with ALS die of respiratory failure within five years of the first appearance of symptoms. Currently, there is no effective treatment for ALS.

[0005] ALS occurs in individuals of all ages, but is most common in individuals between 55 to 75 years of age, with a slightly higher incidence in males. ALS can be characterized as sporadic or familial. Sporadic ALS appears to occur at random and accounts for more than 90% of all incidences of ALS. Familial ALS accounts for 5-10% of all incidences of ALS. Genetic mutations in more than a dozen genes are associated with familial ALS, including mutations in chromosome 9 open reading frame 72 (“C9ORF72”)—which account for between 25-40% of familial ALS cases—and copper-zinc superoxide dismutase 1 (“SOD1”—which accounts for 12-20% of familial ALS cases.

[0006] Interestingly, mutations in several ALS-associated genes, such as TBK1, TARDBP, SQSTM1, VCP, FUS, CHCHD10, and C9ORF72 are also associated with frontotemporal dementia (FTD) and ALS with FTD. FTD refers to a spectrum of progressive neurodegenerative diseases caused by loss of neurons in frontal and temporal lobes of the brain. FTD is characterized by changes in behavior and personality, and language dysfunction. Forms of FTD include behavioral variant FTD (bvFTD), semantic variant primary progressive aphasia (svPPA), and nonfluent variant primary progressive aphasia (nfvPPA). ALS with FTD is characterized by symptoms associated with FTD, along with symptoms of ALS such as muscle weakness, atrophy, fasciculation, spasticity, speech impairment (dysarthia), and inability to swallow (dysphagia). Individuals usually succumb to FTD within 5 to 10 years, while ALS with FTD often results in death within 2 to 3 years of the first disease symptoms appearing.

[0007] Like ALS, there is no known cure for FTD or ALS with FTD, nor a treatment known to prevent or retard either disease's progression.

[0008] Thus, there is a pressing need to identify compounds capable of preventing, ameliorating, and treating neurological diseases such as amyotrophic lateral sclerosis (ALS), frontotemporal dementia (FTD), ALS with FTD, Alzheimer's disease (AD), Parkinson's disease (PD), Huntington's disease, Brachial plexus injuries, peripheral nerve injuries, progressive supranuclear palsy (PSP), brain trauma, spinal cord injury, corticobasal degeneration (CBD) and/or neuropathies such a chemotherapy induced neuropathy, Spinocerebellar ataxia (SCA), Niemann-Pick disease type C (NPC), Charcot-Marie-Tooth Disease (CMT), Mucopolysaccharidosis type II (MPSIIA), Mucolipidosis IV, GM1 gangliosidosis, Sporadic inclusion body myositis (sIBM), Henoch-Schonlein purpura (HSP), and Gaucher's disease.

### SUMMARY

[0009] Described herein are Protein Phosphatase 1A (PPM1A) inhibitors. The instant application is based, in part, on the surprising discovery that PPM1A inhibitors described herein can be used in the treatment of neurological diseases, including motor neuron diseases. For example, PPM1A inhibitors described herein can be used to treat any of amyotrophic lateral sclerosis (ALS), frontotemporal dementia (FTD), ALS with FTD, Alzheimer's disease (AD), Parkinson's disease (PD), Huntington's disease, Brachial plexus injuries, peripheral nerve injuries, progressive supranuclear palsy (PSP), brain trauma, spinal cord injury, corticobasal degeneration (CBD) and/or neuropathies such a chemotherapy induced neuropathy, Spinocerebellar ataxia (SCA), Niemann-Pick disease type C (NPC), Charcot-Marie-Tooth Disease (CMT), Mucopolysaccharidosis type II (MPSIIA), Mucolipidosis IV, GM1 gangliosidosis, Sporadic inclusion body myositis (sIBM), Henoch-Schonlein purpura (HSP), and Gaucher's disease. PPM1A inhibitors described herein include PPM1A antisense oligonucleotides and other PPM1A antisense therapeutics.

[0010] Disclosed herein is a compound comprising an oligonucleotide comprising linked nucleosides with a nucleobase sequence that is at least 90% complementary to an equal length portion of a transcript that is transcribed from at least nucleotide 41,932 to nucleotide 42,787 and from nucleotide 44,874 to nucleotide 44,990 of SEQ ID NO: 1, wherein at least one nucleoside linkage of the linked nucleosides is a non-natural linkage. Additionally disclosed herein is an oligonucleotide comprising linked nucleosides with a nucleobase sequence that is at least 90% complementary to an equal length portion of a transcript that is transcribed from at least nucleotide 41,932 to nucleotide 42,787 and from nucleotide 44,874 to nucleotide 44,990 of SEQ ID NO: 1, wherein at least one nucleoside linkage of the linked nucleosides is a non-natural linkage. In various embodiments, the transcript transcribed from nucleotide 41,932 to nucleotide 42,787 and from nucleotide 44,874 to nucleotide 44,990 of SEQ ID NO: 1 comprises a sequence of any of SEQ ID NO: 2864, SEQ ID NO: 2865, or SEQ ID NO: 2866.

[0011] Additionally disclosed herein is a compound comprising an oligonucleotide comprising linked nucleosides with a nucleobase sequence that is at least 90% complementary to an equal length portion of a transcript that shares at least 90% identity to SEQ ID NO: 2864, SEQ ID NO: 2865, or SEQ ID NO: 2866, or to a contiguous 15 to 50 nucleobase portion of SEQ ID NO: 2864, SEQ ID NO: 2865, or SEQ ID NO: 2866, wherein at least one nucleoside linkage of the linked nucleosides is a non-natural linkage. Additionally disclosed herein is an oligonucleotide comprising linked nucleosides with a nucleobase sequence that is at least 90% complementary to an equal length portion of a transcript that shares at least 90% identity to SEQ ID NO: 2864, SEQ ID NO: 2865, or SEQ ID NO: 2866, or to a contiguous 15 to 50 nucleobase portion of SEQ ID NO: 2864, SEQ ID NO: 2865, or SEQ ID NO: 2866, wherein at least one nucleoside linkage of the linked nucleosides is a non-natural linkage.

[0012] In various embodiments, the nucleobase sequence comprises a portion of at least 10 contiguous nucleobases that shares at least 90% identity with an equal length portion of any one of SEQ ID NOs: 2-955, SEQ ID NOs: 1910-2863, SEQ ID NOs: 2868-2913, and SEQ ID NOs: 2914-2959. In various embodiments, the nucleobase sequence comprises a portion of at least 11, 12, 13, 14, 15, 16, 17, 18, 19, or 20 contiguous nucleobases that shares at least 90% identity with an equal length portion of any one of SEQ ID NOs: 2-955, SEQ ID NOs: 1910-2863, SEQ ID NOs: 2868-2913, and SEQ ID NOs: 2914-2959. In various embodiments, the nucleobase sequence comprises a portion of at least 10 contiguous nucleobases that shares at least 90% identity with an equal length portion of any one of SEQ ID NOs: 2868-2913 and SEQ ID NOs: 2914-2959. In various embodiments, the nucleobase sequence comprises a portion of at least 11, 12, 13, 14, 15, 16, 17, 18, 19, or 20 contiguous nucleobases that shares at least 90% identity with an equal length portion of any one of SEQ ID NOs: 2868-2913 and SEQ ID NOs: 2914-2959.

[0013] In various embodiments, the nucleobase sequence comprises a portion of at least 10 contiguous nucleobases that is at least 90% complementary to an equal length portion of nucleobases within any one of positions 457-1410 of SEQ ID NO: 2864. In various embodiments, the nucleobase sequence comprises a portion of at least 11, 12, 13, 14, 15, 16, 17, 18, 19, or 20 contiguous nucleobases that is at least 90% complementary to an equal length portion of nucleobases within any one of positions 457-1410 of SEQ ID NO: 2864. In various embodiments, the nucleobase sequence comprises a portion of at least 10 contiguous nucleobases that is at least 90% complementary to an equal length portion of nucleobases within any one of positions 542-814, 895-1006, 1025-1117, or 1361-1407 of SEQ ID NO: 2864. In various embodiments, the nucleobase sequence comprises a portion of at least 11, 12, 13, 14, 15, 16, 17, 18, 19, or 20 contiguous nucleobases that is at least 90% complementary to an equal length portion of nucleobases within any one of positions 542-814, 895-1006, 1025-1117, or 1361-1407 of SEQ ID NO: 2864.

[0014] In various embodiments, the nucleobase sequence comprises a portion of at least 10 contiguous nucleobases that is at least 90% complementary to an equal length portion of nucleobases within any one of positions 542-561, 555-574, 559-578, 599-618, 602-621, 603-622, 604-623, 605-624, 606-625, 607-626, 608-627, 609-628, 625-644, 642-661, 644-663, 646-665, 648-667, 650-669, 652-671, 655-674, 656-675, 708-727, 709-728, 794-813, 795-814, 895-914, 900-919, 905-924, 910-929, 915-934, 962-981, 967-986, 972-991, 977-996, 987-1006, 1025-1044, 1030-1049, 1034-1053, 1040-1059, 1045-1064, 1098-1117, 1361-1380, 1366-1385, 1371-1390, 1378-1397, and 1386-1405 of SEQ ID NO: 2864.

[0015] In various embodiments, the nucleobase sequence comprises a portion of at least 11, 12, 13, 14, 15, 16, 17, 18, 19, or 20 contiguous nucleobases that is at least 90% complementary to an equal length portion of nucleobases within any one of positions 542-561, 555-574, 559-578, 599-618, 602-621, 603-622, 604-623, 605-624, 606-625, 607-626, 608-627, 609-628, 625-644, 642-661, 644-663, 646-665, 648-667, 650-669, 652-671, 655-674, 656-675, 708-727, 709-728, 794-813, 795-814, 895-914, 900-919, 905-924, 910-929, 915-934, 962-981, 967-986, 972-991, 977-996, 987-1006, 1025-1044, 1030-1049, 1034-1053, 1040-1059, 1045-1064, 1098-1117, 1361-1380, 1366-1385, 1371-1390, 1378-1397, and 1386-1405 of SEQ ID NO: 2864.

[0016] In various embodiments, the oligonucleotide comprises at least one nucleoside linkage selected from the group consisting of a phosphodiester linkage, a phosphorothioate linkage, an alkyl phosphate linkage, an alkylphosphonate linkage, a 3-methoxypropyl phosphonate linkage, a phosphorodithioate linkage, a phosphotriester linkage, a methylphosphonate linkage, an aminoalkylphosphotriester linkage, an alkylene phosphonate linkage, a phosphinate linkage, a phosphoramidate linkage, a phosphoramidothioate linkage, a phosphorodiamidate (e.g., comprising a phosphorodiamidate morpholino (PMO), 3′ amino ribose, or 5′ amino ribose) linkage, an aminoalkylphosphoramidate linkage, a thiophosphoramidate linkage, a thionoalkylphosphonate linkage, a thionoalkylphosphotriester linkage, a thiophosphate linkage, a selenophosphate linkage, and a boranophosphate linkage, or any combination(s) thereof.

[0017] In various embodiments, at least one internucleoside linkage of the nucleotide sequence is a phosphorothioate linkage. In various embodiments, the phosphorothioate internucleoside linkage is in one of a Rp configuration or a Sp configuration. In various embodiments, the oligonucleotide comprises one or more chiral centers and/or double bonds. In various embodiments, the oligonucleotide exist as stereoisomers selected from geometric isomers, enantiomers, and diastereomers. In various embodiments, all internucleoside linkages of the nucleotide sequence are phosphorothioate linkages.

[0018] In various embodiments, the oligonucleotide comprises at least one modified nucleobase. In various embodiments, the at least one modified nucleobase is 5-methylcytosine, pseudouridine, or 5-methoxyuridine.

[0019] In various embodiments, the oligonucleotide comprises at least one nucleoside with a modified sugar moiety. In various embodiments, the modified sugar moiety is one of a 2′-OMe modified sugar moiety, bicyclic sugar moiety, 2′-O-(2-methoxyethyl) (2′MOE), 2′-deoxy-2′-fluoro nucleoside, 2′-fluoro-β-D-arabinonucleoside, locked nucleic acid (LNA), constrained ethyl 2′-4′-bridged nucleic acid (cEt), S-cEt, hexitol nucleic acids (HNA), and tricyclic analog (e.g., tcDNA). In various embodiments, the oligonucleotide comprises two, three, four, five, six, seven, eight, nine, or ten nucleosides with modified sugar moieties. In various embodiments, the modified sugar moieties are independently any one of a 2′-OMe modified sugar moiety, bicyclic sugar moiety, 2′-O-(2-methoxyethyl) (2′MOE), 2′-deoxy-2′-fluoro nucleoside, 2′-fluoro-β-D-arabinonucleoside, locked nucleic acid (LNA), constrained ethyl 2′-4′-bridged nucleic acid (cEt), S-cEt, hexitol nucleic acids (HNA), and tricyclic analog (e.g., tcDNA).

[0020] In various embodiments, the oligonucleotide comprises ten 2′-O-(2-methoxyethyl) (2′MOE) nucleosides. In various embodiments, five of the 2′-O-(2-methoxyethyl) (2′MOE) nucleosides are located at the 3′ end of the oligonucleotide, and wherein five of the 2′-O-(2-methoxyethyl) (2′MOE) nucleosides are located at the 5′ end of the oligonucleotide. In various embodiments, the at least one nucleoside with the modified sugar moiety or the nucleosides with modified sugar moieties are ribonucleosides. In various embodiments, the oligonucleotide comprises at least one deoxyribonucleoside. In various embodiments, the oligonucleotide comprises two, three, four, five, six, seven, eight, nine, or ten deoxyribonucleosides.

[0021] In various embodiments, the oligonucleotide comprises:
[0022] a. a gap segment comprising one or more of linked deoxyribonucleosides, 2′-Fluoro Arabino Nucleic Acids (FANA), and Fluoro Cyclohexenyl nucleic acid (F-CeNA);
[0023] b. a 5′ wing region comprising linked nucleosides; and
[0024] c. a 3′ wing region comprising linked nucleosides;
[0025] d. wherein the central region comprises a region of at least 8 contiguous nucleobases having at least 80% identity to an equal length portion of any one of SEQ ID NOs: 2-955, SEQ ID NOs: 1910-2863, or SEQ ID NOs: 2868-2959 positioned between the 5′ wing segment and the 3′ wing segment; wherein the 5′ wing region and the 3′ wing region each comprises at least two linked nucleosides; and wherein at least one nucleoside of each wing region comprises a modified sugar.

[0026] In various embodiments, at least two linked nucleosides of the 5′ wing region are linked through a phosphorothioate internucleoside linkage and/or wherein the at least two linked nucleosides of the 3′ wing region are independently linked through a phosphorothioate internucleoside linkage. In various embodiments, every internucleoside linkage of the 5′ wing region and/or every internucleoside linkage of the 3′ wing region, independently are phosphorothioate internucleoside linkages. In various embodiments, the 5′ wing region further comprises at least one phosphodiester internucleoside linkage. In various embodiments, the 3′ wing region further comprises at least one phosphodiester internucleoside linkage.

[0027] In various embodiments, the at least two linked nucleosides of the 5′ wing region are linked through a phosphodiester internucleoside linkage and/or wherein the at least two linked nucleosides of the 3′ wing region are independently linked through a phosphodiester internucleoside linkage. In various embodiments, at least one of the internucleoside linkages of the central region is a phosphodiester linkage. In various embodiments, at least two, at least three, at least four, at least five, at least six, at least seven, at least eight, or at least nine of the internucleoside linkages of the central region are phosphodiester linkages.

[0028] In various embodiments, at least one of the internucleoside linkages of the central region is a phosphorothioate internucleoside linkage. In various embodiments, at least two, at least three, at least four, at least five, at least six, at least seven, at least eight, or at least nine of the internucleoside linkages of the central region are phosphorothioate internucleoside linkages. In various embodiments, all internucleoside linkages of the oligonucleotide are phosphorothioate internucleoside linkages. In various embodiments, any one or all of the phosphorothioate internucleoside linkages are in a Rp configuration, a Sp configuration, or in any combination of Rp and Sp configuration.

[0029] In various embodiments, the oligonucleotide comprises at least one modified sugar moiety. In various embodiments, the 5′ wing region or the 3′ wing region comprises the at least one modified sugar moiety. In various embodiments, the central region comprises the at least one modified sugar moiety. In various embodiments, the at least one modified sugar moiety is any one of a 2′-OMe modified sugar moiety, bicyclic sugar moiety, 2′-O-(2-methoxyethyl) (2′MOE), 2′-deoxy-2′-fluoro nucleoside, 2′-fluoro-β-D-arabinonucleoside, locked nucleic acid (LNA), constrained ethyl 2′-4′-bridged nucleic acid (cEt), S-cEt, tcDNA, hexitol nucleic acids (HNA), and tricyclic analog (e.g., tcDNA).

[0030] In various embodiments, the oligonucleotide comprises one or more 2′-MOE nucleosides. In various embodiments, the 5′ wing region or the 3′ wing region comprise one or more 2′-MOE nucleosides. In various embodiments, the 5′ wing region or the 3′ wing region comprise two, three, four, or five 2′-MOE nucleosides. In various embodiments, every nucleoside of the 5′ wing region or the 3′ wing region is a 2′-MOE nucleoside.

[0031] In various embodiments, the central region comprises one or more 2′-MOE nucleosides. In various embodiments, the central region comprises two, three, four, five, six, seven, eight, nine, or ten 2′-MOE nucleosides. In various embodiments, every nucleoside of the central region is a 2′-MOE nucleoside. In various embodiments, the one or more 2′-MOE nucleosides are linked through phosphorothioate internucleoside linkages.

[0032] In various embodiments, the oligonucleotide comprises sugar modifications in any of the following patterns: eeeee-d10-eeeee, eee-d8-eee, eee-d10-eee, eeee-d10-eeee, and eeee-d8-eeee, wherein e=2′-MOE nucleoside and d=a deoxyribonucleoside. In various embodiments, the oligonucleotide comprises internucleoside linkages in any of the following patterns: sssssooooooooosssss; ooooosssssssssooooo; oooooooooooooosssss; soossssssssssssssss; ssssssssssssssssoos; sssssoooooooooooooo; sssssssssssssssssss; sssooooooosss; ooosssssssooo; sssssssssssss; sosssssssssos; sosssssssssss; sssssssssssos; ssssssssssooo; ooossssssssss; sssooooooooosss; ooosssssssssooo; sssssssssssssss; ssssssssssssooo; ooossssssssssss; sosssssssssssos; sosssssssssssss; sssssssssssssos; ssssooooooooossss; oooosssssssssoooo; sssssssssssssssss; sssssssssssssoooo; soosssssssssssoos; soossssssssssssss; ssssssssssssssoos; oooosssssssssssss; ssssooooooossss; oooosssssssoooo; sssssssssssoooo; oooosssssssssss; soosssssssssoos; soossssssssssss; ssssssssssssoos; or sssssssssssssss; wherein s=a phosphorothioate linkage, and o=a phosphodiester linkage.

[0033] In various embodiments, the oligonucleotide comprises sugar modification and internucleoside linkage combinations, respectively, in any of the following patterns: ssssooooooooossss
[0034] a) eeeee-d10-eeeee and sssssooooooooosssss;
[0035] b) eeeee-d10-eeeee and ooooosssssssssooooo;
[0036] c) eeeee-d10-eeeee and sssssssssssssssssss;
[0037] d) eee-d8-eee and sssooooooosss;
[0038] e) eee-d8-eee and ooosssssssooo
[0039] f) eee-d8-eee and sssssssssssss;
[0040] g) eee-d10-eee and sssooooooooosss;
[0041] h) eee-d10-eee and ooosssssssssooo;
[0042] i) eee-d10-eee and sssssssssssssss;
[0043] j) eeee-d10-eeee and ssssooooooooossss;
[0044] k) eeee-d10-eeee and oooosssssssssoooo;
[0045] l) eeee-d10-eeee and sssssssssssssssss;
[0046] m) eeee-d8-eeee and ssssooooooossss,
[0047] n) eeee-d8-eeee and oooosssssssoooo,
[0048] o) eeee-d8-eeee and sssssssssssssss,
[0049] wherein e=2′-MOE nucleoside and d=a deoxyribonucleoside, and wherein s=a phosphorothioate linkage, and o=a phosphodiester linkage.

[0050] In various embodiments, the oligonucleotide comprises at least one modified nucleobase. In various embodiments, the 5′ wing region or the 3′ wing region comprises the at least one modified nucleobase. In various embodiments, the central region comprises the at least one modified nucleobase. In various embodiments, the at least one modified nucleobase is 5′-methylcytosine, pseudouridine, or 5-methoxyuridine. In various embodiments, every cytosine in the 5′ wing region or the 3′ wing region is a 5′-methylcytosine. In various embodiments, every cytosine in the central region is a 5′-methylcytosine.

[0051] In various embodiments, the oligonucleotide comprises sugar modification and internucleoside linkage combination of:
[0052] eeeee-d10-eeeee and sssssssssssssssssss, wherein e=2′-MOE nucleoside and d=a deoxyribonucleoside, and wherein s=a phosphorothioate linkage,

[0053] wherein each cytosine of the 2′MOE nucleosides is a 5-methylcytosine.

[0054] In various embodiments, the oligonucleotide further comprises a conjugate moiety. In various embodiments, the conjugate moiety is a cholesterol conjugate located on the 3′ end of the oligonucleotide.

[0055] Additionally disclosed herein is a pharmaceutical composition comprising any one of the oligonucleotides disclosed above, or a pharmaceutically acceptable salt thereof, and a pharmaceutically acceptable excipient.

[0056] Additionally disclosed herein is a method of treating a neurological disease in a patient in need thereof, the method comprising administering to the patient an oligonucleotide of any one of the oligonucleotides disclosed above, or a pharmaceutically acceptable salt thereof, or a pharmaceutical composition disclosed above.

[0057] In various embodiments, the neurological disease is selected from the group consisting of amyotrophic lateral sclerosis (ALS), frontotemporal dementia (FTD), ALS with FTD, Alzheimer's disease (AD), Parkinson's disease (PD), Huntington's disease, Brachial plexus injuries, peripheral nerve injuries, progressive supranuclear palsy (PSP), brain trauma, spinal cord injury, corticobasal degeneration (CBD) and/or neuropathies such a chemotherapy induced neuropathy, Spinocerebellar ataxia (SCA), Niemann-Pick disease type C (NPC), Charcot-Marie-Tooth Disease (CMT), Mucopolysaccharidosis type II (MPSIIA), Mucolipidosis IV, GM1 gangliosidosis, Sporadic inclusion body myositis (sIBM), Henoch-Schonlein purpura (HSP), or Gaucher's disease.

[0058] Additionally disclosed herein is a method of increasing autophagy in a cell, the method comprising exposing the cell to a PPM1A inhibitor. Additionally disclosed herein is a method of increasing TBK1 ser172 phosphorylation in a cell, the method comprising exposing the cell to a PPM1A inhibitor. Additionally disclosed herein is a method of increasing TBK1 function in a cell, the method comprising exposing the cell to a PPM1A inhibitor. Additionally disclosed herein is a method of inhibiting PPM1A in a cell, the method comprising exposing the cell to a PPM1A inhibitor. Additionally disclosed herein is a method of inhibiting RIPK1 activity in a cell, the method comprising exposing the cell to a PPM1A inhibitor.

[0059] In various embodiments, the cell is a cell of a patient in need of treatment of a neurological disease. In various embodiments, the neurological disease is selected from the group consisting of amyotrophic lateral sclerosis (ALS), frontotemporal dementia (FTD), ALS with FTD, Alzheimer's disease (AD), Parkinson's disease (PD), Huntington's disease, Brachial plexus injuries, peripheral nerve injuries, progressive supranuclear palsy (PSP), brain trauma, spinal cord injury, corticobasal degeneration (CBD) and/or neuropathies such a chemotherapy induced neuropathy, Spinocerebellar ataxia (SCA), Niemann-Pick disease type C (NPC), Charcot-Marie-Tooth Disease (CMT), Mucopolysaccharidosis type II (MPSIIA), Mucolipidosis IV, GM1 gangliosidosis, Sporadic inclusion body myositis (sIBM), Henoch-Schonlein purpura (HSP), or Gaucher's disease. In various embodiments, the exposing is performed in vivo or ex vivo. In various embodiments, the exposing comprises administering the PPM1A inhibitor to a patient in need thereof.

[0060] In various embodiments, the PPM1A inhibitor is administered topically, parenterally, intrathecally, intracisternally, orally, rectally, buccally, sublingually, vaginally, pulmonarily, intratracheally, intranasally, transdermally, or intraduodenally. In various embodiments, the PPM1A inhibitor is administered intrathecally. In various embodiments, a therapeutically effective amount of the PPM1A inhibitor is administered. In various embodiments, the patient is a human.

[0061] In various embodiments, the PPM1A inhibitor comprises the PPM1A antisense oligonucleotide of any one of the oligonucleotides disclosed above, a pharmaceutically acceptable salt thereof, or a pharmaceutical composition disclosed above. In various embodiments, the pharmaceutical composition is suitable for topical, intrathecal, parenteral, oral, pulmonary, intratracheal, intranasal, transdermal, rectal, buccal, sublingual, vaginal, intracisternal, or intraduodenal administration.

[0062] Additionally disclosed herein is a use of a PPM1A inhibitor in the manufacture of a medicament for the treatment of neurological disease. In various embodiments, the neurological disease is selected from the group consisting of amyotrophic lateral sclerosis (ALS), frontotemporal dementia (FTD), ALS with FTD, Alzheimer's disease (AD), Parkinson's disease (PD), Huntington's disease, Brachial plexus injuries, peripheral nerve injuries, progressive supranuclear palsy (PSP), brain trauma, spinal cord injury, corticobasal degeneration (CBD) and/or neuropathies such a chemotherapy induced neuropathy, Spinocerebellar ataxia (SCA), Niemann-Pick disease type C (NPC), Charcot-Marie-Tooth Disease (CMT), Mucopolysaccharidosis type II (MPSIIA), Mucolipidosis IV, GM1 gangliosidosis, Sporadic inclusion body myositis (sIBM), Henoch-Schonlein purpura (HSP), or Gaucher's disease. In various embodiments, the PPM1A inhibitor is the PPM1A antisense oligonucleotide of any one of the oligonucleotides disclosed above.

[0063] Additionally disclosed herein is a method of treating a neurological disease in a patient in need thereof, the method comprising administering to a patient in need thereof a therapeutically effective amount of a pharmaceutical composition comprising a PPM1A inhibitor, and a pharmaceutically acceptable excipient. In various embodiments, the neurological disease is selected from the group consisting of amyotrophic lateral sclerosis (ALS), frontotemporal dementia (FTD), ALS with FTD, Alzheimer's disease (AD), Parkinson's disease (PD), Huntington's disease, Brachial plexus injuries, peripheral nerve injuries, progressive supranuclear palsy (PSP), brain trauma, spinal cord injury, corticobasal degeneration (CBD) and/or neuropathies such a chemotherapy induced neuropathy, Spinocerebellar ataxia (SCA), Niemann-Pick disease type C (NPC), Charcot-Marie-Tooth Disease (CMT), Mucopolysaccharidosis type II (MPSIIA), Mucolipidosis IV, GM1 gangliosidosis, Sporadic inclusion body myositis (sIBM), Henoch-Schonlein purpura (HSP), or Gaucher's disease. In various embodiments, the PPM1A inhibitor is the PPM1A antisense oligonucleotide of any one of the oligonucleotides disclosed above, a pharmaceutically acceptable salt thereof, or a pharmaceutical composition disclosed above.

[0064] In various embodiments, the pharmaceutical composition is administered topically, parenterally, orally, pulmonarily, rectally, buccally, sublingually, vaginally, intratracheally, intranasally, intrathecally, intracisternally, transdermally, or intraduodenally. In various embodiments, the pharmaceutical composition is administered intrathecally. In various embodiments, the patient is human.

[0065] Additionally disclosed herein is a PPM1A antisense oligonucleotide of any one of the oligonucleotides disclosed above, or a pharmaceutically acceptable salt thereof, for use as a medicament. Additionally disclosed herein is a PPM1A antisense oligonucleotide of any one of the oligonucleotides disclosed above, or a pharmaceutically acceptable salt thereof, for use in the treatment of a neurological disease. In various embodiments, the neurological disease is selected from the group consisting of amyotrophic lateral sclerosis (ALS), frontotemporal dementia (FTD), ALS with FTD, Alzheimer's disease (AD), Parkinson's disease (PD), Huntington's disease, Brachial plexus injuries, peripheral nerve injuries, progressive supranuclear palsy (PSP), brain trauma, spinal cord injury, corticobasal degeneration (CBD) and/or neuropathies such a chemotherapy induced neuropathy, Spinocerebellar ataxia (SCA), Niemann-Pick disease type C (NPC), Charcot-Marie-Tooth Disease (CMT), Mucopolysaccharidosis type II (MPSIIA), Mucolipidosis IV, GM1 gangliosidosis, Sporadic inclusion body myositis (sIBM), Henoch-Schonlein purpura (HSP), or Gaucher's disease.

[0066] Additionally disclosed herein is a Protein Phosphatase 1A (PPM1A) antisense oligonucleotide selected from the group consisting of: a PPM1A antisense oligonucleotide comprising the nucleotide sequence of any one of SEQ ID NOs: 2-955, SEQ ID NOs: 1910-2863, SEQ ID NOs: 2868-2913, and SEQ ID NOs: 2914-2959, or a pharmaceutically acceptable salt thereof, wherein at least one nucleoside linkage of the nucleotide sequence is selected from the group consisting of: a phosphodiester linkage, a phosphorothioate linkage, an alkyl phosphate linkage, an alkylphosphonate linkage, a 3-methoxypropyl phosphonate linkage, a phosphorodithioate linkage, a phosphotriester linkage, a methylphosphonate linkage, an aminoalkylphosphotriester linkage, an alkylene phosphonate linkage, a phosphinate linkage, a phosphoramidate linkage, a phosphoramidothioate linkage, a phosphorodiamidate (e.g., comprising a phosphorodiamidate morpholino (PMO), 3′ amino ribose, or 5′ amino ribose) linkage, an aminoalkylphosphoramidate linkage, a thiophosphoramidate linkage, a thionoalkylphosphonate linkage, a thionoalkylphosphotriester linkage, a thiophosphate linkage, a selenophosphate linkage, and a boranophosphate linkage; and/or wherein at least one nucleoside of the linked nucleosides is substituted with a component selected from the group consisting of a 2′-O-(2-methoxyethyl) (2′-MOE) nucleoside, a 2′-O-methyl nucleoside, a 2′-deoxy-2′-fluoro nucleoside, a 2′-fluoro-β-D-arabinonucleoside, a locked nucleic acid (LNA), constrained methoxyethyl (cMOE), constrained ethyl (cET), and a peptide nucleic acid (PNA).

[0067] In various embodiments, at least one internucleoside linkage of the nucleotide sequence is a phosphorothioate linkage. In various embodiments, the phosphorothioate internucleoside linkage is in one of a Rp configuration or a Sp configuration. In various embodiments, all internucleoside linkages of the nucleotide sequence are phosphorothioate linkages.

[0068] Additionally disclosed herein is a pharmaceutical composition comprising the antisense oligonucleotide of any one of the oligonucleotides disclosed above, or a pharmaceutically acceptable salt thereof, and a pharmaceutically acceptable excipient. In various embodiments, the patient for treatment is identified by measuring the presence or level of expression of neurofilament light (NEFL), neurofilament heavy (NEFH), phosphorylated neurofilament heavy chain (pNFH), TDP-43, or p75^{ECD} in the plasma, the spinal cord fluid, the cerebrospinal fluid, the extracellular vesicles (for example, CSF exosomes), the blood, the urine, the lymphatic fluid, fecal matter, or a tissue of the patient. In various embodiments, the patient for treatment is identified by measuring phosphorylated neurofilament heavy chain (pNFH) in cerebrospinal fluid (CSF). In various embodiments, the pNFH in the CSF of the patient is used to predict disease status and survival in C9ORF72-associated amyotrophic lateral sclerosis (c9ALS) patients after initial administration and/or during on-going treatment.

[0069] Additionally disclosed herein is a method of treating a neurological disease and/or a neuropathy in a patient in need thereof, the method comprising administering to a patient in need thereof a therapeutically effective amount of an oligonucleotide of any one the oligonucleotides disclosed above or a pharmaceutically acceptable salt thereof, or a pharmaceutical composition disclosed above, in combination with a second therapeutic agent selected from a group comprising Riluzole (Rilutek), troriluzole, Edaravone (Radicava), rivastigmine, donepezil, galantamine, selective serotonin reuptake inhibitor, antipsychotic agents, cholinesterase inhibitors, memantine, benzodiazepine antianxiety drugs, AMX0035 (ELYBRIO®), ZILUCOPLAN (RA101495). dual AON intrathecal administration (e.g., BIIB067, BIIB078), BIIB100, levodopa/carbidopa, dopaminergic agents (e.g., ropinirole, pramipexole, rotigotine), medroxyprogesterone, KCNQ2/KCNQ3 openers, Pridopidine, PrimeC (combination of ciprofloxacin and Celebrex), lithium, anticonvulsants and psychostimulant agents, breathing care, physical therapy, occupational therapy, speech therapy, and nutritional support. In various embodiments, the neurological disease is any one of amyotrophic lateral sclerosis (ALS), frontotemporal dementia (FTD), or ALS with FTD.

[0070] Additionally disclosed is a method of treating a neurological disease and/or a neuropathy in a patient in need thereof, the method comprising administering to a patient in need thereof a therapeutically effective amount of an oligonucleotide of any one of the oligonucleotides disclosed above or a pharmaceutically acceptable salt thereof, or a pharmaceutical composition disclosed above, in combination with a second therapeutic agent selected from a group comprising Memantine, Rivastigmine, Galantamine, Donepezil, Aricept®, Exelon® (Rivastigmine), Razadyne®, Aducanumab, BAN2401, BIIB091 (gosuranemab), BIIB076, BIIB080 (IONIS-MAPTRx), Elayta (CT1812), MK1942, allogenic hMSC, nilotinib, ABT-957, acitretin, ABT-354, GV1001, Riluzole, CAD106, CNP520, AD-35, Rilapladib, DHP1401, T-817 MA, TC-5619, TPI-287, RVT-101, LY450139, JNJ-54861911, Dapagliflozin, GSK239512, PF-04360365, ASP0777, SB-742457 (a 5-HT6 receptor antagonist), PF-03654746 (an H₃ receptor antagonist), GSK933776 (an Fc-inactivated anti-D amyloid (AD) monoclonal antibody (mAb)), Posiphen ((+)-phenserine tartrate), AMX0035 (ELYBRIO®), coenzyme Q10, or any combination thereof.

[0071] In various embodiments, the neurological disease is Alzheimer's Disease.

[0072] Additionally disclosed is a method of treating a neurological disease and/or a neuropathy in a patient in need thereof, the method comprising administering to a patient in need thereof a therapeutically effective amount of an oligonucleotide of any one of the oligonucleotides disclosed above or a pharmaceutically acceptable salt thereof, or a pharmaceutical composition disclosed above, in combination with a second therapeutic agent selected from a group comprising Levodopa, Carbidopa-levidopa, pramipexole, ropinirole, rotigotine, apomorphine, selegiline, rasagiline, entacapone, tolcapone, amantadine, trihexyphenidyl, BIIB054 (cinepanemab), BIIB094, BIIB118, ABBV-0805, zonisamide, deep brain stimulation, brain-derived neurotrophic factor, stem-cell transplant, Niacin, brain stem stimulation, nicotine, nabilone, PF-06649751, DNL201, LRRK2 inhibitors, CK1 inhibitors, isradipine, CLR4001, IRX4204, Yohimbine, coenzyme Q10, OXB-102, duloxetine, pioglitazone, preladenant, or any combination thereof. In various embodiments, the neurological disease is Parkinson's Disease.

[0073] Additionally disclosed is a method of treating a neurological disease and/or a neuropathy in a patient in need thereof, the method comprising administering to a patient in need thereof a therapeutically effective amount of an oligonucleotide of any one of the oligonucleotides disclosed above or a pharmaceutically acceptable salt thereof, or a pharmaceutical composition disclosed above, in combination with a second therapeutic agent selected from a group comprising UCB0107, ABBV-8E12, F-18 AV1451, BIIB092, C2N-8E12, tideglusib, deep transcranial magnetic stimulation, lipoic acid, tolfenamica acid, lithium, AZP2006, Glial Cell Line-Derived Neurotrophic Factor, NBMI, suvorxant, zolpidem, TPI 287, davunetide, pimavanserin, Levodopa, Carbidopa-levidopa, pramipexole, ropinirole, rotigotine, apomorphine, selegiline, rasagiline, entacapone, tolcapone, amantadine, trihexyphenidyl, BIIB054 (cinepanemab), BIIB094, BIIB118, ABBV-0805, zonisamide, deep brain stimulation, brain-derived neurotrophic factor, stem-cell transplant, Niacin, brain stem stimulation, nicotine, nabilone, PF-06649751, DNL201, LRRK2 inhibitors, CK1 inhibitors, isradipine, CLR4001, IRX4204, Yohimbine, coenzyme Q10, OXB-102, duloxetine, pioglitazone, preladenant, or any combination thereof. In various embodiments, the neurological disease is progressive supranuclear palsy (PSP).

[0074] Additionally disclosed is a method of treating a neurological disease and/or a neuropathy in a patient in need thereof, the method comprising administering to a patient in need thereof a therapeutically effective amount of an oligonucleotide of any one of the oligonucleotides disclosed above or a pharmaceutically acceptable salt thereof, or a pharmaceutical composition disclosed above, in combination with a second therapeutic agent selected from a group comprising Tetrabenazine, deutetrabenazine, physical therapy, risperidone, haloperidol, chlorpromazine, clonazepam, diazepam, benzodiazepines, selective serotonin reuptake inhibitors. quetiapine, carbatrol, valproate, lamotrigine, pridopidine, delta-9-tetrahydrocannabinol, cannabidiol, stem-cell therapy, ISIS-443139, nilotinib, resveratrol, neflamapimod, fenofibrate, creatine, RO7234292, SAGE-718, WVE-120102, WVE-120101, dimebon, minocycline, deep brain stimulation, ursodiol, coenzyme Q10, OMS643762, VX15/2503, PF-02545920, BN82451B, SEN0014196, olanzapine, tiapridal (tiapride), or any combination thereof. In various embodiments, the neurological disease is Huntington's Disease.

[0075] Additionally disclosed is a method of treating a neurological disease and/or a neuropathy in a patient in need thereof, the method comprising administering to a patient in need thereof a therapeutically effective amount of an oligonucleotide of any one of the oligonucleotides disclosed above or a pharmaceutically acceptable salt thereof, or a pharmaceutical composition disclosed above, in combination with a second therapeutic agent selected from a group comprising anticoagulants, antidepressants, muscle relaxants, stimulants, anticonvulsants, anti-anxiety medication, erythropoietin, hyperbaric treatment, rehabilitation therapies (e.g., physical, occupational, speech, psychological, or vocational counseling), or any combination thereof. In various embodiments, the neurological disease is brain trauma.

[0076] Additionally disclosed is a method of treating a neurological disease and/or a neuropathy in a patient in need thereof, the method comprising administering to a patient in need thereof a therapeutically effective amount of an oligonucleotide of any one of the oligonucleotides disclosed above or a pharmaceutically acceptable salt thereof, or a pharmaceutical composition disclosed above, in combination with a second therapeutic agent selected from a group comprising AXER-204, glyburide, 5-hydroxytryptophan (5-HTP), L-3,4-dihydroxyphenylalanine (L-DOPA), or rehabilitation therapies (e.g., physical therapy, occupational therapy, recreational therapy, use of assistive devices, improved strategies for exercise and healthy diets), or any combination thereof. In various embodiments, the neurological disease is spinal cord injury.

[0077] Additionally disclosed is a method of treating a neurological disease and/or a neuropathy in a patient in need thereof, the method comprising administering to a patient in need thereof a therapeutically effective amount of an oligonucleotide of any one of the oligonucleotides disclosed above or a pharmaceutically acceptable salt thereof, or a pharmaceutical composition disclosed above, in combination with a second therapeutic agent selected from a group comprising TPI-287, lithium, occupational, physical, and speech therapy, or any combination thereof can be selected as an additional therapy. In various embodiments, the neurological disease is corticobasal degeneration.

[0078] Additionally disclosed is a method of treating a neurological disease and/or a neuropathy in a patient in need thereof, the method comprising administering to a patient in need thereof a therapeutically effective amount of an oligonucleotide of any one of the oligonucleotides disclosed above or a pharmaceutically acceptable salt thereof, or a pharmaceutical composition disclosed above, in combination with a second therapeutic agent selected from a group comprising gabapentin, pregabalin, lamotrigine, carbamazepine, duloxetine, gabapentinoids, tricyclic antidepressants, serotonin-norepinephrine reuptake inhibitors, opioids, neurotoxin, dextromethorphan, nicotinamide riboside, auto-antibodies targeting neuronal antigens (TS-HDS and FGFR3), or any combination thereof. In various embodiments, the neuropathy is a chemotherapy induced neuropathy.

[0079] Additionally disclosed is a method of treating a neurological disease and/or a neuropathy in a patient in need thereof, the method comprising administering to a patient in need thereof a therapeutically effective amount of an oligonucleotide of any one of the oligonucleotides disclosed above or a pharmaceutically acceptable salt thereof, or a pharmaceutical composition disclosed above, in combination with a second therapeutic agent selected from a group comprising troriluzole, BHV-4157, or a combination thereof. In various embodiments, the neurological disease is spinocerebellar ataxia.

[0080] Additionally disclosed is a method of treating a neurological disease and/or a neuropathy in a patient in need thereof, the method comprising administering to a patient in need thereof a therapeutically effective amount of an oligonucleotide of any one of the oligonucleotides disclosed above or a pharmaceutically acceptable salt thereof, or a pharmaceutical composition disclosed above, in combination with a second therapeutic agent selected from a group comprising anti-seizure medications, speech therapy, physical therapy, occupational therapy, Adrabetadex, Arimoclomol, N-Acetyl-L-Leucine, or any combination thereof. In various embodiments, the neurological disease is Niemann-Pick disease type C.

[0081] Additionally disclosed is a method of treating a neurological disease and/or a neuropathy in a patient in need thereof, the method comprising administering to a patient in need thereof a therapeutically effective amount of an oligonucleotide of any one of the oligonucleotides disclosed above or a pharmaceutically acceptable salt thereof, or a pharmaceutical composition disclosed above, in combination with a second therapeutic agent selected from a group comprising physical and occupational therapies, orthopedic surgery, orthopedic devices, PXT3003, or any combination thereof. In various embodiments, the neurological disease is Charcot-Marie-Tooth Disease (CMT).

[0082] Additionally disclosed is a method of treating a neurological disease and/or a neuropathy in a patient in need thereof, the method comprising administering to a patient in need thereof a therapeutically effective amount of an oligonucleotide of any one of the oligonucleotides disclosed above or a pharmaceutically acceptable salt thereof, or a pharmaceutical composition disclosed above, in combination with a second therapeutic agent selected from a group comprising enzyme replacement therapy: idursulfase (Elaprase), surgical intervention (tonsillectomy and/or adenoidectomy), RGX-121 gene therapy, adalimumab, MT2013-31, or any combination thereof. In various embodiments, the neurological disease is Mucopolysaccharidosis type II (MPSIIA).

[0083] Additionally disclosed is a method of treating a neurological disease and/or a neuropathy in a patient in need thereof, the method comprising administering to a patient in need thereof a therapeutically effective amount of an oligonucleotide of any one of the oligonucleotides disclosed above or a pharmaceutically acceptable salt thereof, or a pharmaceutical composition disclosed above, in combination with a second therapeutic agent selected from a group comprising physical, occupational, and speech therapies, contact lenses and artificial tears, genetic counseling, or any combination thereof. In various embodiments, the neurological disease is Mucolipidosis IV.

[0084] Additionally disclosed is a method of treating a neurological disease and/or a neuropathy in a patient in need thereof, the method comprising administering to a patient in need thereof a therapeutically effective amount of an oligonucleotide of any one of the oligonucleotides disclosed above or a pharmaceutically acceptable salt thereof, or a pharmaceutical composition disclosed above, in combination with a second therapeutic agent selected from a group comprising anticonvulsants, physical and occupational therapies, galactosidase, gene delivery of galactosidase, LYS-GM101 gene therapy, or any combination thereof. In various embodiments, the neurological disease is GM1 gangliosidosis.

[0085] Additionally disclosed is a method of treating a neurological disease and/or a neuropathy in a patient in need thereof, the method comprising administering to a patient in need thereof a therapeutically effective amount of an oligonucleotide of any one of the oligonucleotides disclosed above or a pharmaceutically acceptable salt thereof, or a pharmaceutical composition disclosed above, in combination with a second therapeutic agent selected from a group comprising physical and occupational therapies, use of devices such as braces, walkers, wheelchairs, immunosuppressants, BYM338, or any combination thereof. In various embodiments, the neurological disease is Sporadic inclusion body myositis (sIBM).

[0086] Additionally disclosed is a method of treating a neurological disease and/or a neuropathy in a patient in need thereof, the method comprising administering to a patient in need thereof a therapeutically effective amount of an oligonucleotide of any one of the oligonucleotides disclosed above or a pharmaceutically acceptable salt thereof, or a pharmaceutical composition disclosed above, in combination with a second therapeutic agent selected from a group comprising corticosteroids, colchicine, dapsone, azathioprine, or any combination thereof. In various embodiments, the neurological disease is Henoch-Schonlein purpura (HSP).

[0087] Additionally disclosed is a method of treating a neurological disease and/or a neuropathy in a patient in need thereof, the method comprising administering to a patient in need thereof a therapeutically effective amount of an oligonucleotide of any one of the oligonucleotides disclosed above or a pharmaceutically acceptable salt thereof, or a pharmaceutical composition disclosed above, in combination with a second therapeutic agent selected from a group comprising enzyme replacement therapy, substrate reduction therapy, N-acetylcysteine, GZ/SAR402671, cerezyme, or any combination thereof. In various embodiments, the neurological disease is Gaucher's disease.

[0088] In various embodiments, the transcript comprises a sequence of SEQ ID NO: 2864 and is further transcribed from nucleotides 8,470-8, 926, 44,991-45,990, 49,055-49,164, 50,647-50,704, and 51,703-58,336 of SEQ ID NO: 1. In various embodiments, the transcript comprises a sequence of SEQ ID NO: 2865 and is further transcribed from nucleotides 8,470-8,926, 9,629-9,730, and 44,911-47,804 of SEQ ID NO: 1. In various embodiments, the transcript comprises a sequence of SEQ ID NO: 2866 and is further transcribed from nucleotides 4,999-5,295, 49,055-49,164, 50,647-50,704, and 51,703-58,336 of SEQ ID NO: 1.

[0089] Additionally disclosed herein is a method of treating a neurological disease in a patient, the method comprising selecting a patient for treatment with an oligonucleotide of any one of the oligonucleotides disclosed above or a pharmaceutically acceptable salt thereof, or a pharmaceutical composition disclosed above, wherein the patient for treatment is selected by a method comprising measuring a presence or level of expression of neurofilament light (NEFL), neurofilament heavy (NEFH), phosphorylated neurofilanent heavy chain (pNFH), TDP-43, or p75^{ECD} in the plasma, the spinal cord fluid, the cerebrospinal fluid, the extracellular vesicles (for example, CSF exosomes), the blood, the urine, the lymphatic fluid, fecal matter, or a tissue of the patient. In various embodiments, the patient for treatment is identified by measuring phosphorylated neurofilament heavy chain (pNFH) in cerebrospinal fluid (CSF). In various embodiments, the pNFH in the CSF of the patient is used to predict disease status and survival in C9ORF72-associated amyotrophic lateral sclerosis (c9ALS) patients after initial administration and/or during on-going treatment.

[0090] Additionally disclosed is a method of treating a neurological disease in a patient, the method comprising selecting a patient for treatment with an oligonucleotide of any one of the oligonucleotides disclosed above or a pharmaceutically acceptable salt thereof, or a pharmaceutical composition disclosed above, wherein the method comprises: determining whether the patient has a mutation in one or more ALS-associated genes selected from the group comprising TBK1, TARDBP, SQSTM1, VCP, C9orf72, FUS, and CHCHD10; identifying the patient as a candidate patient for treatment according to the determination; and optionally administering, to the candidate patient, the oligonucleotide of any one of the oligonucleotides disclosed above or a pharmaceutically acceptable salt thereof, or a pharmaceutical composition disclosed above,

[0091] Additionally disclosed is a method of treating a neurological disease in a patient, the method comprising administering to the patient an oligonucleotide of any one of the oligonucleotides disclosed above or a pharmaceutically acceptable salt thereof, or a pharmaceutical composition disclosed above, wherein the patient for treatment is selected by a method comprising measuring a presence or level of expression of neurofilament light (NEFL), neurofilament heavy (NEFH), phosphorylated neurofilament heavy chain (pNFH), TDP-43, or p75^{ECD} in the plasma, the spinal cord fluid, the cerebrospinal fluid, the extracellular vesicles (for example, CSF exosomes), the blood, the urine, the lymphatic fluid, fecal matter, or a tissue of the patient. In various embodiments, the patient for treatment is identified by measuring phosphorylated neurofilament heavy chain (pNFH) in cerebrospinal fluid (CSF). In various embodiments, the pNFH in the CSF of the patient is used to predict disease status and survival in C9ORF72-associated amyotrophic lateral sclerosis (c9ALS) patients after initial administration and/or during on-going treatment.

[0092] Additionally disclosed is a method of treating a neurological disease in a patient, the method comprising administering to the patient an oligonucleotide of any one of the oligonucleotides disclosed above or a pharmaceutically acceptable salt thereof, or a pharmaceutical composition disclosed above, wherein the patient is selected for treatment by a method comprising: determining whether the patient has a mutation in one or more ALS-associated genes selected from the group comprising TBK1, TARDBP, SQSTM1, VCP, C9orf72, FUS, and CHCHD10; identifying the patient as a candidate patient for treatment according to the determination.

### BRIEF DESCRIPTION OF THE DRAWINGS

[0093] FIG. 1 is a bar graph showing the results of RT-qPCR analysis of PPM1A levels in BP6074 cells treated with transfection reagent alone (“Lipofectamine 3000 Alone”) or transfected with varying concentrations (5 nM, 20 nM, 50 nM, 200 nM, or 500 nM) of PPM1A AON candidates (QPA-905, QPA-972, QPA-1034, QPA-1045, and QPA-1371) for 72 hours. All experiments were performed in triplicate (n=3).

[0094] FIG. 2A is a bar graph showing the amount of PPM1A, as evaluated by RT-qPCR. SY5Y cells were left untreated, treated with transfection reagent alone (“lipofectamine 3000 alone”), or transfected with various concentrations (5 nM, 20 nM, 50 nM, 200 nM, or 500 nM) of the PPM1A AON QPA-1371, an siRNA control (“siControl,” 50 nM), or a PPM1A siRNA (“siPPM1A,” 50 nM). RT-qPCR was performed 48 hours after transfection.

[0095] FIG. 2B is a bar graph showing the amount of PPM1A, as evaluated by RT-qPCR. SY5Y cells were left untreated, treated with transfection reagent alone (“endoporter alone”), or transfected with various concentrations (5 nM, 20 nM, 50 nM, 200 nM, or 500 nM) of the PPM1A AON candidates (QPA-905, QPA-972, QPA-1034, QPA-1045, QPA-1371, or QPA-895), an siRNA control (“siControl,” 50 nM), or a PPM1A siRNA (“siPPM1A,” 50 nM). RT-qPCR was performed 48 hours after transfection.

[0096] FIG. 3A is a bar graph showing the ratio of phosphorylated TBK1 to total TBK1 (“pTBK1/TBK1”) as a percent of the ratio in healthy control cells, as evaluated by Western blot. BP6074 cells were treated with RNAiMax transfection reagent alone (“patient cells”) or transfected with 5 μM of the PPM1A AON candidates QPA-1045 or QPA-1371. Cell media was changed 24 hours post-transfection and protein was collected 48 hours later (n=3; *, p<0.05; **, p<0.01). GAPDH protein levels were used to normalize pTBK1 and TBK1 protein levels.

[0097] FIG. 3B is a bar graph showing the amount of PPM1A, as evaluated by Western blot. BP6074 cells were treated with RNAiMax transfection reagent alone (“patient cells”) or transfected with 5 μM of the PPM1A AON candidates QPA-1045 or QPA-1371. Cell media was changed 24 hours post-transfection and protein was collected 48 hours later (n=3; ** p<0.01).

[0098] FIG. 4A-FIG. 4Y are line graphs of RNA-knockdown potency of various candidate antisense oligonucleotides quantifying the decrease in PPM1A RNA with increasing AON concentration in SY5Y cells. FIG. 4A represents RNA-knockdown potency of SEQ ID NO: 2898 (QPA-962); FIG. 4B represents RNA-knockdown potency of SEQ ID NO: 2899 (QPA-967); FIG. 4C represents RNA-knockdown potency of SEQ ID NO:2900 (QPA-972); FIG. 4D represents RNA-knockdown potency of SEQ ID NO: 2901 (QPA-977); FIG. 4E represents RNA-knockdown potency of SEQ ID NO: 2902 (QPA-987); FIG. 4F represents RNA-knockdown potency of SEQ ID NO: 2903 (QPA-1025); FIG. 4G represents RNA-knockdown potency of SEQ ID NO: 2904 (QPA-1030); FIG. 4H represents RNA-knockdown potency of SEQ ID NO: 2905 (QPA-1034); FIG. 4I represents RNA-knockdown potency of SEQ ID NO: 2906 (QPA-1040); FIG. 4J represents RNA-knockdown potency of SEQ ID NO: 2907 (QPA-1045); FIG. 4K represents RNA-knockdown potency of SEQ ID NO: 2909 (QPA-1361); FIG. 4L represents RNA-knockdown potency of SEQ ID NO: 2910 (QPA-1366); FIG. 4M represents RNA-knockdown potency of SEQ ID NO: 2911 (QPA-1371); FIG. 4N represents RNA-knockdown potency of SEQ ID NO: 2912 (QPA-1378); FIG. 4O represents RNA-knockdown potency of SEQ ID NO: 2913 (QPA-1386); FIG. 4P represents RNA-knockdown potency of SEQ ID NO: 2868 (QPA-542); FIG. 4Q represents RNA-knockdown potency of SEQ ID NO: 2869 (QPA-555); FIG. 4R represents RNA-knockdown potency of SEQ ID NO: 2883 (QPA-646); FIG. 4S represents RNA-knockdown potency of SEQ ID NO: 2870 (QPA-559); FIG. 4T represents RNA-knockdown potency of SEQ ID NO: 2908 (QPA-1098); FIG. 4U represents RNA-knockdown potency of SEQ ID NO: 2893 (QPA-895); FIG. 4V represents RNA-knockdown potency of SEQ ID NO: 2894 (QPA-900); FIG. 4W represents RNA-knockdown potency of SEQ ID NO: 2895 (QPA-905); FIG. 4X represents RNA-knockdown potency of SEQ ID NO: 2896 (QPA-910); and FIG. 4Y represents RNA-knockdown potency of SEQ ID NO: 2897 (QPA-915).

[0099] FIGS. 5A-5T and FIGS. 6A-6K are line graphs of RNA-knockdown potency of various candidate antisense oligonucleotides quantifying the decrease in PPM1A RNA with increasing AON concentration in human motor neurons. FIG. 5A represents RNA-knockdown potency of SEQ ID NO: 2883 (QPA-646); FIG. 5B represents RNA-knockdown potency of SEQ ID NO: 2893 (QPA-895); FIG. 5C represents RNA-knockdown potency of SEQ ID NO: 2895 (QPA-905); FIG. 5D represents RNA-knockdown potency of SEQ ID NO: 2911 (QPA-1371); FIG. 5E represents RNA-knockdown potency of SEQ ID NO: 2896 (QPA-910); FIG. 5F represents RNA-knockdown potency of SEQ ID NO: 2897 (QPA-915); FIG. 5G represents RNA-knockdown potency of SEQ ID NO: 2900 (QPA-972); FIG. 5H represents RNA-knockdown potency of SEQ ID NO: 2905 (QPA-1034); FIG. 5I represents RNA-knockdown potency of SEQ ID NO: 2906 (QPA-1040); FIG. 5J represents RNA-knockdown potency of SEQ ID NO: 2907 (QPA-1045); FIG. 5K represents RNA-knockdown potency of SEQ ID NO: 2871 (QPA-599); FIG. 5L represents RNA-knockdown potency of SEQ ID NO: 2876 (QPA-606); FIG. 5M represents RNA-knockdown potency of SEQ ID NO: 2880 (QPA-625); FIG. 5N represents RNA-knockdown potency of SEQ ID NO: 2881 (QPA-642); FIG. 5O represents RNA-knockdown potency of SEQ ID NO: 2882 (QPA-644); FIG. 5P represents RNA-knockdown potency of SEQ ID NO: 2884 (QPA-648); FIG. 5Q represents RNA-knockdown potency of SEQ ID NO: 2885 (QPA-650); FIG. 5R represents RNA-knockdown potency of SEQ ID NO: 2886 (QPA-652); FIG. 5S represents RNA-knockdown potency of SEQ ID NO: 2887 (QPA-655);

[0100] FIG. 5T represents RNA-knockdown potency of SEQ ID NO: 2888 (QPA-656); FIG. 6A represents RNA-knockdown potency of SEQ ID NO: 2872 (QPA-602); FIG. 6B represents RNA-knockdown potency of SEQ ID NO: 2873 (QPA-603); FIG. 6C represents RNA-knockdown potency of SEQ ID NO: 2874 (QPA-604); FIG. 6D represents RNA-knockdown potency of SEQ ID NO: 2875 (QPA-605); FIG. 6E represents RNA-knockdown potency of SEQ ID NO: 2877 (QPA-607); FIG. 6F represents RNA-knockdown potency of SEQ ID NO: 2878 (QPA-608); FIG. 6G represents RNA-knockdown potency of SEQ ID NO: 2879 (QPA-609);

[0101] FIG. 6H represents RNA-knockdown potency of SEQ ID NO: 2889 (QPA-708); FIG. 6I represents RNA-knockdown potency of SEQ ID NO: 2890 (QPA-709); FIG. 6J represents RNA-knockdown potency of SEQ ID NO: 2891 (QPA-794); and FIG. 6K represents RNA-knockdown potency of SEQ ID NO: 2892 (QPA-795).

[0102] FIGS. 7A and 7B show reduction of PPM1A expression in two ALS iPSC lines (TBK1 and C9orf72) following treatment using PPM1A AONs (QPA-895, QPA-905, QPA-915, QPA-1045, QPA-1371, AND QPA-646).

[0103] FIG. 8 shows the decreased PPM1A relative quantity in human motor neurons in response to treatment using PPM1A AONs with a cholesterol conjugate group (QPA-606-C, QPA-642-C, QPA-644-C).

[0104] FIG. 9 shows the reduction in PPM1A protein in response to treatment using PPM1A AONs (QPA-646 and QPA-915).

[0105] FIG. 10 shows the decrease in PPM1A protein levels in wildtype iPSC-derived motor neurons in response to treatment using PPM1A AONs (QPA-642, QPA-646, QPA-1371, QPA-905, and QPA-915).

[0106] FIGS. 11A-11C show the qualitative and quantitative results of the Western blot analysis in human motor neurons treated using PPM1A AONs (QPA-646 and QPA-905).

[0107] FIGS. 12A-12D show the qualitative and quantitative results of the Western blot analysis in wildtype iPSC-derived human motor neurons treated using PPM1A AON (QPA-646).

[0108] FIG. 13 shows the percent rescue of cell survival in a proteotoxic stress neurodegeneration model in response to treatment using PPM1A AONs (QPA-905, QPA-1045, and QPA-895).

### DETAILED DESCRIPTION

[0109] The features and other details of the disclosure will now be more particularly described. Before further description of the present invention, certain terms employed in the specification, examples and appended claims are collected here. These definitions should be read in light of the remainder of the disclosure and understood as by a person of skill in the art. Unless defined otherwise, all technical and scientific terms used herein have the same meaning as commonly understood by a person of ordinary skill in the art.

### Definitions

[0110] The terms “treat,” “treatment,” “treating,” and the like are used herein to generally mean obtaining a desired pharmacological and/or physiological effect. The effect may be therapeutic in terms of partially or completely curing a disease and/or adverse effect attributed to the disease. The term “treatment” as used herein covers any treatment of a disease in a mammal, particularly a human, and includes: (a) inhibiting the disease, e.g., preventing the disease from increasing in severity or scope; (b) relieving the disease, e.g., causing partial or complete amelioration of the disease; or (c) preventing relapse of the disease, e.g., preventing the disease from returning to an active state following previous successful treatment of symptoms of the disease or treatment of the disease.

[0111] “Preventing” includes delaying the onset of clinical symptoms, complications, or biochemical indicia of the state, disorder, disease, or condition developing in a subject that may be afflicted with or predisposed to the state, disorder, disease, or condition but does not yet experience or display clinical or subclinical symptoms of the state, disorder, disease, or condition. “Preventing” includes prophylactically treating a state, disorder, disease, or condition in or developing in a subject, including prophylactically treating clinical symptoms, complications, or biochemical indicia of the state, disorder, disease, or condition in or developing in a subject.

[0112] The term “pharmaceutically acceptable carrier” or “pharmaceutically acceptable excipient” as used herein interchangeably refers to any and all solvents, dispersion media, coatings, isotonic and absorption delaying agents, and the like, that are compatible with pharmaceutical administration. The use of such media and agents for pharmaceutically active substances is well known in the art. The compositions may also contain other active compounds providing supplemental, additional, or enhanced therapeutic functions.

[0113] The term “pharmaceutical composition” as used herein refers to a composition comprising at least one biologically active compound, for example, a PPM1A antisense oligonucleotide (AON), as disclosed herein formulated together with one or more pharmaceutically acceptable excipients.

[0114] “Individual,” “patient,” or “subject” are used interchangeably and include to any animal, including mammals, preferably mice, rats, other rodents, rabbits, dogs, cats, swine, cattle, sheep, horses, or non-human primates, and most preferably humans. The compounds of the invention can be administered to a mammal, such as a human, but can also be other mammals such as an animal in need of veterinary treatment, e.g., domestic animals (e.g., dogs, cats, and the like), farm animals (e.g., cows, sheep, pigs, horses, and the like) and laboratory animals (e.g., rats, mice, guinea pigs, non-human primates, and the like). In some embodiments, the mammal treated in the methods of the invention is desirably a mammal in whom modulation of PPM1A expression and/or activity is desired.

[0115] A patient suffering from ALS, FTD, ALS with FTD, or another neurological or motor neuron disease can be a patient that is diagnosed with the disease or that displays symptoms of the disease. A patient suffering from ALS, FTD, ALS with FTD, or another neurological or motor neuron disease can be a patient that previously suffered from the disease and, after recovering or experiencing complete or partial amelioration of the disease and/or disease symptoms, experiences a complete or partial relapse of the disease or disease symptoms. A patient suffering from ALS, FTD, ALS with FTD, or another neurological or motor neuron disease or condition can be a patient that harbors a genetic mutation associated with manifestation of the disease or condition. For example, a patient suffering from ALS can be a patient that harbors a genetic mutation in any of SOD1, C9orf72, Ataxin 2 (ATXN2), Charged Multivesicular Body Protein 2B (CHMP2B), Dynactin 1 (DCTN1), Human Epidermal Growth Factor Receptor 4 (ERBB4), FIG. 4 phosphoinositide 5-phosphatase (FIG. 4), NIMA related kinase 1 (NEK1), Heterogeneous nuclear ribonucleoprotein A1 (HNRNPA1), Neurofilament Heavy (NEFH), Peripherin (PRPH), TAR DNA binding protein 43 (TDP43 or TARDP), Fused in Sarcoma (FUS), Ubiquilin-2 (UBQLN2), Kinesin Family Member 5A (KIF5A), Valosin-Containing Protein (VCP), Alsin (ALS2), Senataxin (SETX), Sigma Non-Opioid Intracellular Receptor 1 (SIGMAR1), Survival of Motor Neuron 1, Telomeric (SMN1), Spastic Paraplegia 11, Autosomal Recessive (SPG11), Transient Receptor Potential Cation Channel Subfamily M Member 7 (TRPM7), Vesicle-Associated Membrane Protein-Associated Protein B/C (VAPB), Angiogenin (ANG), Profilin-1 (PFN1), Matrin-3 (MATR3), Coiled-coil-helix-coiled-coil-helix domain Containing 10 (CHCHD10), Tubulin, Alpha 4A (TUBA4A), TBK1, C21orf2, Sequestosome-1 (SQSTM1, also known as Ubiquitin-binding protein p62), and/or optineurin (OPTN), in particular, where the mutation is associated with ALS or a high risk of developing ALS.

[0116] A patient at risk of ALS, FTD, ALS with FTD, or another neurological or motor neuron disease can include those patients with a familial history of the disease or a genetic predisposition to the disease (e.g., a patient that harbors a genetic mutation associated with high disease risk, for example), or patients exposed to environmental factors that increase disease risk. For example, a patient may be at risk of ALS if the patient harbors a mutation in any of SOD1, C9orf72, ATXN2, CHMP2B, DCTN1, ERBB4, FIG. 4, HNRNPA1, NEFH, PRPH, NEK1, TDP43, FUS, UBQLN2, KIF5A, VCP, ALS2, SETX, SIGMAR1, SMN1, SPG11, TRPM7, VAPB, ANG, PFN1, MATR3, CHCHD10, TUBA4A, TBK1, SQSTM1, C21orf2, and/or OPTN, in particular, where the mutation is associated with ALS or high risk of developing ALS. A patient at risk may also include those patients diagnosed with a disease or condition that has a high comorbidity with ALS, FTD, ALS with FTD, or another neurological or motor neuron disease (for example, a patient suffering from dementia, which is significantly associated with higher odds of a family history of ALS, FTD, and of bulbar onset ALS (see Trojsi, F., et al. (2017) “Comorbidity of dementia with amyotrophic lateral sclerosis (ALS): insights from a large multicenter Italian cohort” J Neurol 264: 2224-31)).

[0117] As used herein, “PPM1A” (also known as Protein Phosphatase, Mg²⁺/Mn²⁺ Dependent 1A, Protein Phosphatase 1A (Formerly 2C), Magnesium-Dependent, Alpha Isoform, Protein Phosphatase 1A, EC 3.1.3.16, Protein Phosphatase 2C Isoform Alpha, Protein Phosphatase IA, Phosphatase 2C Alpha, PP2C-Alpha, PPPM1A, and PP2CA) refers to the gene or gene products (e.g., protein or mRNA transcript (including pre-mRNA) encoded by the gene) identified by Entrez Gene ID No. 5494 and allelic variants thereof, as well as orthologs found in non-human species (e.g., non-human primates or mice).

[0118] As used herein, “TBK1” (also known as Serine/threonine-protein kinase TBK1, NF-kappa-B-activating kinase, T2K, NAK, EC 2.7.11, FTDALS4 3, IIAE8, and TANK-binding kinase 1) refers to the gene or gene products (e.g., protein or mRNA transcript (including pre-mRNA) encoded by the gene) identified by Entrez Gene ID No. 29110 and allelic variants thereof, as well as orthologs found in non-human species (e.g., non-human primates or mice).

[0119] In the present specification, the term “therapeutically effective amount” means the amount of the subject PPM1A inhibitor that will elicit the biological or medical response of a tissue, system, animal or human that is being sought by the researcher, veterinarian, medical doctor, or other clinician. The PPM1A inhibitors of the invention are administered in therapeutically effective amounts to treat and/or prevent a disease, condition, disorder, or state, for example, ALS, FTD, ALS with FTD, or another motor neuron disease or neurological disease or condition. Alternatively, a therapeutically effective amount of a PPM1A inhibitor is the quantity required to achieve a desired therapeutic and/or prophylactic effect, such as an amount which results in the prevention of or a decrease in the symptoms associated with a disease associated with TBK1 inhibition, decreased TBK1 activity, or unwanted or deleterious PPM1A activity.

[0120] The terms “PPM1A AON” or “PPM1A antisense oligonucleotide” refers to an antisense oligonucleotide that is complementary to a portion of a PPM1A gene product, such as a PPM1A mRNA transcript. Examples of PPM1A AONs include PPM1A AONs with a sequence of any one of SEQ ID NOs: 2-955 or SEQ ID NOs: 1910-2863 or PPM1A Gapmer AONs with a sequence of any one of SEQ ID NOs: 2868-2959. “PPM1A AON” further includes PPM1A gapmer AONs.

[0121] The term “PPM1A gapmer AON” refers to a PPM1A AON with at least three distinct structural regions including a 5′-wing region, a central region, and a 3′-wing region, in ‘5→3’ orientation. The central region comprises a stretch of nucleosides that enable recruitment and activation of RNAseH. For example, the central region comprises linked DNA nucleosides, 2′-Fluoro Arabino Nucleic Acids (FANA), and Fluoro Cyclohexenyl nucleic acid (F-CeNA).

[0122] The term “pharmaceutically acceptable salt(s)” as used herein refers to salts of acidic or basic groups that may be present in PPM1A inhibitors used in the present compositions. PPM1A inhibitors included in the present compositions that are basic in nature are capable of forming a wide variety of salts with various inorganic and organic acids. The acids that may be used to prepare pharmaceutically acceptable acid addition salts of such basic compounds are those that form non-toxic acid addition salts, e.g., salts containing pharmacologically acceptable anions, including but not limited to malate, oxalate, chloride, bromide, iodide, nitrate, sulfate, bisulfate, phosphate, acid phosphate, isonicotinate, acetate, lactate, salicylate, citrate, tartrate, oleate, tannate, pantothenate, bitartrate, ascorbate, succinate, maleate, gentisinate, fumarate, gluconate, glucuronate, saccharate, formate, benzoate, glutamate, methanesulfonate, ethanesulfonate, benzenesulfonate, p-toluenesulfonate and pamoate (e.g., 1,1′-methylene-bis-(2-hydroxy-3-naphthoate)) salts. PPM1A inhibitors included in the present compositions that include an amino moiety may form pharmaceutically acceptable salts with various amino acids, in addition to the acids mentioned above. Compounds included in the present compositions that are acidic in nature are capable of forming base salts with various pharmacologically acceptable cations. Examples of such salts include alkali metal or alkaline earth metal salts and, particularly, calcium, magnesium, sodium, lithium, zinc, potassium, and iron salts. Pharmaceutically acceptable salts of the disclosure include, for example, pharmaceutically acceptable salts of PPM1A AONs that include a nucleotide sequence of any of SEQ ID NOs: 2-955, SEQ ID NOs: 1910-2863, SEQ ID NOs: 2868-2913, and SEQ ID NOs: 2914-2959.

[0123] PPM1A inhibitors of the disclosure may contain one or more chiral centers, groups, linkages, and/or double bonds and, therefore, exist as stereoisomers, such as geometric isomers, enantiomers or diastereomers. The term “stereoisomers” when used herein consist of all geometric isomers, enantiomers or diastereomers. These compounds may be designated by the symbols “R” or “S” (or “Rp” or “Sp”) depending on the configuration of substituents around the stereogenic atom, for example, a stereogenic carbon, phosphorus, or sulfur atom. In some embodiments, one or more linkages of the compound may have a Rp or Sp configuration (e.g., one or more phosphorothioate linkages have either a Rp or Sp configuration). The configuration of each phosphorothioate linkage may be independent of another phosphorothioate linkage (e.g., one phosphorothioate linkage has a Rp configuration and a second phosphorothioate linkage has a Sp configuration). The present invention encompasses various stereoisomers of these compounds and mixtures thereof. Stereoisomers include enantiomers and diastereomers. Mixtures of enantiomers or diastereomers may be designated “(±)” in nomenclature, but the skilled artisan will recognize that a structure may denote a chiral center implicitly. Individual stereoisomers of PPM1A inhibitors of the present invention can be prepared synthetically from commercially available starting materials that contain asymmetric or stereogenic centers, or by preparation of racemic mixtures followed by resolution methods well known to those of ordinary skill in the art. These methods of resolution are exemplified by (1) attachment of a mixture of enantiomers to a chiral auxiliary, separation of the resulting mixture of diastereomers by recrystallization or chromatography and liberation of the optically pure product from the auxiliary, (2) salt formation employing an optically active resolving agent, or (3) direct separation of the mixture of optical enantiomers on chiral chromatographic columns. Stereoisomeric mixtures can also be resolved into their component stereoisomers by well-known methods, such as chiral-phase gas chromatography, chiral-phase super critical fluid chromatography, chiral-phase simulated moving bed chromatography, chiral-phase high performance liquid chromatography, crystallizing the compound as a chiral salt complex, or crystallizing the compound in a chiral solvent. Stereoisomers can also be obtained from stereomerically-pure intermediates, reagents, and catalysts by well-known asymmetric synthetic methods.

[0124] Individual stereoisomers of PPM1A inhibitors of the present invention can be prepared synthetically from commercially available starting materials that contain asymmetric or stereogenic centers, or by preparation of racemic mixtures followed by resolution methods well known to those of ordinary skill in the art. These methods of resolution are exemplified by (1) attachment of a mixture of enantiomers to a chiral auxiliary, separation of the resulting mixture of diastereomers by recrystallization or chromatography and liberation of the optically pure product from the auxiliary, (2) salt formation employing an optically active resolving agent, or (3) direct separation of the mixture of optical enantiomers on chiral chromatographic columns. Stereoisomeric mixtures can also be resolved into their component stereoisomers by well-known methods, such as chiral-phase super critical fluid chromatography, chiral-phase simulated moving bed chromatography, chiral-phase gas chromatography, chiral-phase high performance liquid chromatography, crystallizing the compound as a chiral salt complex, or crystallizing the compound in a chiral solvent. Stereoisomers can also be obtained from stereomerically-pure intermediates, reagents, and catalysts by well-known asymmetric synthetic methods.

[0125] The PPM1A inhibitors disclosed herein can exist in solvated as well as unsolvated forms with pharmaceutically acceptable solvents such as water, ethanol, and the like, and it is intended that the invention embrace both solvated and unsolvated forms.

[0126] The invention also embraces isotopically labeled compounds of the invention (e.g., isotopically labeled PPM1A inhibitors) which are identical to those recited herein, except that one or more atoms are replaced by an atom having an atomic mass or mass number different from the atomic mass or mass number most abundantly found in nature. Examples of isotopes that can be incorporated into compounds of the invention include isotopes of hydrogen, carbon, nitrogen, oxygen, phosphorus, fluorine and chlorine, such as ²H, ³H, ¹¹C, ¹³C, ¹⁴C, ¹⁵N, ¹⁸O, ¹⁷O, ³¹P ³²P, ³⁵S, ¹⁸F, and ³⁶Cl, respectively.

[0127] Certain isotopically labeled disclosed compounds (e.g., those labeled with ³H and ¹⁴C) are useful in compound and/or substrate tissue distribution assays. Tritiated (i.e., ³H) and carbon-14 (i.e., ¹⁴C) isotopes are particularly preferred for their ease of preparation and detectability. Further, substitution with heavier isotopes such as deuterium (i.e., ²H) may afford certain therapeutic advantages resulting from greater metabolic stability (e.g., increased in vivo half-life or reduced dosage requirements) and hence may be preferred in some circumstances.

[0128] As used herein, “2′-O-(2-methoxyethyl)” (also 2′-MOE and 2′-O(CH₂)₂OCH₃ and MOE) refers to an O-methoxyethyl modification of the 2′ position of a furanose ring. A 2′-O-(2-methoxyethyl) modified sugar is a modified sugar.

[0129] As used herein, “2′-MOE nucleoside” (also 2′-O-(2-methoxyethyl) nucleoside) means a nucleoside comprising a 2′-MOE modified sugar moiety.

[0130] As used herein, “2′-substituted nucleoside” means a nucleoside comprising a substituent at the 2′-position of the furanose ring other than H or OH. In certain embodiments, 2′ substituted nucleosides include nucleosides with bicyclic sugar modifications.

[0131] As used herein, “bicyclic sugar” means a furanose ring modified by the bridging of two atoms. A bicyclic sugar is a modified sugar.

[0132] As used herein, “bicyclic nucleoside” (also BNA) means a nucleoside having a sugar moiety comprising a bridge connecting two carbon atoms of the sugar ring, thereby forming a bicyclic ring system. In certain embodiments, the bridge connects the 4′-carbon and the 2′-carbon of the sugar ring.

[0133] As used herein, “cEt” or “constrained ethyl” means a bicyclic nucleoside having a sugar moiety comprising a bridge connecting the 4′-carbon and the 2′-carbon, wherein the bridge has the formula: 4′-CH(CH₃)—O-2′.

[0134] As used herein, “constrained ethyl nucleoside” (also cEt nucleoside) means a nucleoside comprising a bicyclic sugar moiety comprising a 4′-CH(CH₃)—O-2′ bridge. In some embodiments, cEt can be modified. In some embodiments, the cEt can be S-cEt. In some other embodiments, the cEt can be R-cEt.

[0135] As used herein, “internucleoside linkage” refers to the atom or group that links the 3′ and 5′ position of the sugar or corresponding positions of a sugar mimetic. In some embodiments, as used herein, “non-natural linkage” refers to a “modified internucleoside linkage.”

[0136] As used herein, “contiguous” in the context of an oligonucleotide refers to nucleosides, nucleobases, sugar moieties, or internucleoside linkages that are immediately adjacent to each other. For example, “contiguous nucleobases” means nucleobases that are immediately adjacent to each other in a sequence.

[0137] As used herein, “modified nucleobase” means any nucleobase other than adenine, cytosine, guanine, thymine, or uracil. Examples of a modified nucleobase include 5-methylcytosine, pseudouridine, or 5-methoxyuridine. An “unmodified nucleobase” means the purine bases adenine (A) and guanine (G), and the pyrimidine bases thymine (T), cytosine (C), and uracil (U).

[0138] As used herein, “5-methylcytosine” means a cytosine modified with a methyl group attached to the 5 position. A 5-methylcytosine is a modified nucleobase.

[0139] As used herein, a “modified nucleoside” means a nucleoside having, independently, a modified sugar moiety and/or modified nucleobase. A universal base is a modified nucleobase that can pair with any one. of the five unmodified nucleobases. Modified nucleosides include abasic nucleosides, which lack a nucleobase.

[0140] As used herein, “linked nucleosides” are nucleosides that are connected in a contiguous sequence (I.e., no additional nucleosides are presented between those that are linked).

[0141] As used herein, “hybridization” means the pairing or annealing of complementary oligonucleotides and/or nucleic acids. While not limited to a particular mechanism, the most common mechanism of hybridization involves hydrogen bonding, which may be Watson-Crick, Hoosteen or reversed Hoosteen hydrogen bonding between complementary nucleobases.

[0142] As used herein, “increasing the amount of activity” refers to increased activity relative to the transcriptional expression or activity in an untreated or control sample.

[0143] As used herein, “mismatch” or “non-complementary nucleobase” refers to the case when a nucleobase of a first nucleic acid is not capable of pairing with the corresponding nucleobase of a second or target nucleic acid.

[0144] As used herein, “modified internucleoside linkage” refers to a substitution or any change from a naturally occurring internucleoside linkage (e.g., a phosphodiester internucleoside bond). “Phosphorothioate linkage” is a modified internucleoside linkage in which one of the non-bridging oxygen atoms of a phosphodiester internucleoside linkage is replaced with a sulfur atom.

[0145] As used herein, “modified oligonucleotide” means an oligonucleotide comprising at least one modified internucleoside linkage, modified sugar, and/or modified nucleobase.

[0146] As used herein, “modified sugar” or “modified sugar moiety” means a modified furanosyl sugar moiety or a modified sugar moiety having other than a furanosyl moiety that can link a nucleobase to another group, such as an internucleoside linkage, conjugate group, or terminal group in an oligonucleotide.

[0147] As used herein, “monomer” means a single unit of an oligomer. Monomers include, but are not limited to, nucleosides and nucleotides, whether naturally occurring or modified.

[0148] As used herein, “motif” means the pattern of unmodified and modified nucleosides in an antisense compound.

[0149] As used herein, “natural sugar moiety” means a sugar moiety found in DNA (2′-H) or RNA (2′-OH).

[0150] As used herein, “naturally occurring internucleoside linkage” means a 3′ to 5′ phosphodiester linkage.

[0151] As used herein, “nucleobase” means a heterocyclic moiety capable of pairing with a base of another nucleic acid.

[0152] As used herein, “nucleobase complementarity” refers to a nucleobase that is capable of base pairing with another nucleobase. For example, in DNA, adenine (A) is complementary to thymine (T). For example, in RNA, adenine (A) is complementary to uracil (U). In certain embodiments, complementary nucleobase refers to a nucleobase of an antisense compound that is capable of base pairing with a nucleobase of its target nucleic acid. For example, if a nucleobase at a certain position of an antisense compound is capable of hydrogen bonding with a nucleobase at a certain position of a target nucleic acid, then the position of hydrogen bonding between the oligonucleotide and the target nucleic acid is considered to be complementary at that nucleobase pair.

[0153] As used herein, “nucleobase sequence” means the order of contiguous nucleobases independent of any sugar, linkage, and/or nucleobase modification.

[0154] As used herein, “nucleoside” means a nucleobase linked to a sugar. The term “nucleoside” also includes a “modified nucleoside” which has independently, a modified sugar moiety and/or modified nucleobase.

[0155] As used herein, “nucleoside mimetic” includes those structures used to replace the sugar or the sugar and the base and not necessarily the linkage at one or more positions of an oligomeric compound such as for example nucleoside mimetics having morpholino, cyclohexenyl, cyclohexyl, tetrahydropyranyl, bicyclo, or tricyclo sugar mimetics, e.g., non-furanose sugar units. Nucleotide mimetic includes those structures used to replace the nucleoside and the linkage at one or more positions of an oligomeric compound such as for example peptide nucleic acids or morpholinos (morpholinos linked by —N(H)—C(═O)—O—or other non-phosphodiester linkage). Sugar surrogate overlaps with the slightly broader term nucleoside mimetic but is intended to indicate replacement of the sugar unit (furanose ring) only. The tetrahydropyranyl rings provided herein are illustrative of an example of a sugar surrogate wherein the furanose sugar group has been replaced with a tetrahydropyranyl ring system. “Mimetic” refers to groups that are substituted for a sugar, a nucleobase, and/or internucleoside linkage. Generally, a mimetic is used in place of the sugar or sugar-internucleoside linkage combination, and the nucleobase is maintained for hybridization to a selected target.

[0156] As used herein, “nucleotide” means a nucleoside having a phosphate group covalently linked to the sugar portion of the nucleoside.

[0157] As used herein, “oligomeric compound” or “oligomer” means a polymer of linked monomeric subunits which is capable of hybridizing to at least a region of a nucleic acid molecule.

[0158] As used herein, “oligonucleotide” means a polymer of linked nucleosides each of which can be modified or unmodified, independent one from another.

[0159] The disclosure provides methods for treating, ameliorating, or preventing a neurological disease such as, but not limited to, amyotrophic lateral sclerosis (ALS), frontotemporal dementia (FTD), ALS with FTD, Alzheimer's disease (AD), Parkinson's disease (PD), Huntington's disease, Brachial plexus injuries, peripheral nerve injuries, progressive supranuclear palsy (PSP), brain trauma, spinal cord injury, corticobasal degeneration (CBD) and/or neuropathies such a chemotherapy induced neuropathy, Spinocerebellar ataxia (SCA), Niemann-Pick disease type C (NPC), Charcot-Marie-Tooth Disease (CMT), Mucopolysaccharidosis type II (MPSIIA), Mucolipidosis IV, GM1 gangliosidosis, Sporadic inclusion body myositis (sIBM), Henoch-Schonlein purpura (HSP), and Gaucher's disease, in a patient, comprising administering to a patient a PPM1A inhibitor effective to inhibit PPM1A activity and/or expression and/or to increase TBK1 expression, phosphorylation, and/or activity, where the composition comprises a therapeutically effective amount of a PPM1A inhibitor, and a pharmaceutically acceptable excipient. Also provided herein are methods of treating, ameliorating, or preventing a neurological disease such as, but not limited to, amyotrophic lateral sclerosis (ALS), frontotemporal dementia (FTD), ALS with FTD, Alzheimer's disease (AD), Parkinson's disease (PD), Huntington's disease, Brachial plexus injuries, peripheral nerve injuries, progressive supranuclear palsy (PSP), brain trauma, spinal cord injury, corticobasal degeneration (CBD) and/or neuropathies such a chemotherapy induced neuropathy, Spinocerebellar ataxia (SCA), Niemann-Pick disease type C (NPC), Charcot-Marie-Tooth Disease (CMT), Mucopolysaccharidosis type II (MPSIIA), Mucolipidosis IV, GM1 gangliosidosis, Sporadic inclusion body myositis (sIBM), Henoch-Schonlein purpura (HSP), or Gaucher's disease, a condition, or a disorder characterized by symptoms associated with a neurological disease such as, but not limited to, amyotrophic lateral sclerosis (ALS), frontotemporal dementia (FTD), ALS with FTD, Alzheimer's disease (AD), Parkinson's disease (PD), Huntington's disease, Brachial plexus injuries, peripheral nerve injuries, progressive supranuclear palsy (PSP), brain trauma, spinal cord injury, corticobasal degeneration (CBD) and/or neuropathies such a chemotherapy induced neuropathy, Spinocerebellar ataxia (SCA), Niemann-Pick disease type C (NPC), Charcot-Marie-Tooth Disease (CMT), Mucopolysaccharidosis type II (MPSIIA), Mucolipidosis IV, GM1 gangliosidosis, Sporadic inclusion body myositis (sIBM), Henoch-Schonlein purpura (HSP), or Gaucher's disease, comprising administering to a patient a composition effective to inhibit PPM1A activity and/or expression and/or to increase TBK1 expression, phosphorylation, and/or activity, wherein the composition comprises a therapeutically effective amount of a PPM1A inhibitor, for example, a PPM1A AON, and a pharmaceutically acceptable excipient.

[0160] For example, in some embodiments, methods for treating, ameliorating, or preventing a neurological disease such as, but not limited to, amyotrophic lateral sclerosis (ALS), frontotemporal dementia (FTD), ALS with FTD, Alzheimer's disease (AD), Parkinson's disease (PD), Huntington's disease, Brachial plexus injuries, peripheral nerve injuries, progressive supranuclear palsy (PSP), brain trauma, spinal cord injury, corticobasal degeneration (CBD) and/or neuropathies such a chemotherapy induced neuropathy, Spinocerebellar ataxia (SCA), Niemann-Pick disease type C (NPC), Charcot-Marie-Tooth Disease (CMT), Mucopolysaccharidosis type II (MPSIIA), Mucolipidosis IV, GM1 gangliosidosis, Sporadic inclusion body myositis (sIBM), Henoch-Schonlein purpura (HSP), or Gaucher's disease, or treating, ameliorating, or preventing a neurological disease, condition, or a disorder characterized symptoms associated with a neurological disease such as, but not limited to, amyotrophic lateral sclerosis (ALS), frontotemporal dementia (FTD), ALS with FTD, Alzheimer's disease (AD), Parkinson's disease (PD), Huntington's disease, Brachial plexus injuries, peripheral nerve injuries, progressive supranuclear palsy (PSP), brain trauma, spinal cord injury, corticobasal degeneration (CBD) and/or neuropathies such a chemotherapy induced neuropathy, Spinocerebellar ataxia (SCA), Niemann-Pick disease type C (NPC), Charcot-Marie-Tooth Disease (CMT), Mucopolysaccharidosis type II (MPSIIA), Mucolipidosis IV, GM1 gangliosidosis, Sporadic inclusion body myositis (sIBM), Henoch-Schonlein purpura (HSP), or Gaucher's disease, include methods of administering a pharmaceutically acceptable composition, for example, a pharmaceutically acceptable formulation, that includes one or more PPM1A inhibitors, to a patient. PPM1A inhibitors can inhibit PPM1A activity, for example, PPM1A phosphatase activity, and/or levels of PPM1A expression, for example, PPM1A mRNA and/or protein expression. Without wishing to be bound by theory, a PPM1A inhibitor can inhibit PPM1A activity and/or expression and increase TBK1 expression, phosphorylation, and/or activity by decreasing the amount of active PPM1A, allowing a greater portion of total TBK1 to retain a phosphorylated form.

[0161] The present disclosure also provides pharmaceutical compositions comprising PPM1A inhibitors as disclosed herein formulated together with one or more pharmaceutically or cosmetically acceptable excipients. These formulations include those suitable for oral, sublingual, intratracheal, intranasal, vaginal, rectal, topical, transdermal, pulmonary, intrathecal, intracisternal, buccal, and parenteral (e.g., subcutaneous, intramuscular, intradermal, intraduodenal, or intravenous) administration, or for topical use, e.g., as part of a composition suitable for applying topically to skin and/or mucous membrane, for example, a composition in the form of a gel, a paste, a wax, a cream, a spray, a liquid, a foam, a lotion, an ointment, a topical solution, a transdermal patch, a powder, a vapor, or a tincture. Although the most suitable form of administration in any given case will depend on the degree and severity of the condition being treated and on the nature of the particular PPM1A inhibitor being used.

[0162] The present invention also provides a pharmaceutical composition comprising a PPM1A inhibitor, or a pharmaceutically acceptable salt thereof (for example, a PPM1A AON that includes a nucleotide sequence of any of SEQ ID NOs: 2-955, SEQ ID NOs: 1910-2863, SEQ ID NOs: 2868-2913, and SEQ ID NOs: 2914-2959).

[0163] The present disclosure also provides methods that include the use of pharmaceutical compositions comprising PPM1A inhibitors as disclosed herein (e.g., a PPM1A AON of any one of SEQ ID NOs: 2-955, SEQ ID NOs: 1910-2863, SEQ ID NOs: 2868-2913, and SEQ ID NOs: 2914-2959) formulated together with one or more pharmaceutically acceptable excipients. Exemplary compositions provided herein include compositions comprising essentially a PPM1A inhibitor, as described above, and one or more pharmaceutically acceptable excipients. Formulations include those suitable for oral, sublingual, intratracheal, intranasal, rectal, vaginal, topical, transdermal, pulmonary, intrathecal, intracisternal, buccal, and parenteral (e.g., subcutaneous, intramuscular, intradermal, intraduodenal, or intravenous) administration, or for topical use. The most suitable form of administration in any given case will depend on the clinical symptoms, complications, or biochemical indicia of the state, disorder, disease, or condition that one is trying to prevent in a subject; the state, disorder, disease, or condition one is trying to prevent in a subject; and/or on the nature of the particular compound and/or the composition being used.

[0164] PPM1A Inhibitors

[0165] In certain embodiments, PPM1A levels (e.g., PPM1A mRNA or protein levels) and/or activity (e.g., biological activity, for example, PPM1A phosphatase activity) can be decreased using compounds or compositions that target the PPM1A gene or a PPM1A gene product (for example, a PPM1A mRNA). Similarly, phosphorylated TBK1 (pTBK1) levels (e.g., pTBK1 protein levels) and/or activity (e.g., TBK1 biological activity, for example, kinase activity) can be increased using compounds or compositions that target the PPM1A gene or a PPM1A gene product (for example, a PPM1A mRNA or a PPM1A pre-mRNA). In various embodiments, such PPM1A inhibitors are PPM1A antisense therapeutics e.g., antisense oligonucleotides (AONs) that target the PPM1A gene or PPM1A gene product (e.g., PPM1A mRNA).

[0166] PPM1A inhibitors can be, but are not limited to, compounds such as PPM1A antibodies and antibody fragments (for example, PPM1A monoclonal antibodies, PPM1A Fab fragments (e.g., F(ab′)₂ and Fab′), PPM1A variable fragments (e.g., PPM1A single-chain variable fragments, dimeric single-chain variable fragments, and single-domain antibodies), and PPM1A bispecific monoclonal antibodies), small molecule inhibitors of PPM1A, nucleotide-based inhibitors of PPM1A (for example, PPM1A shRNAs, PPM1A siRNAs, PPM1A PNAs, PPM1A LNAs, or PPM1A morpholino oligomers), or compositions that include such compounds.

[0167] PPM1A antibodies include, for example, anti-PPM1A antibody p6c7 (Cat. No. ab14824; Abcam, Cambridge, Mass., USA), anti-PPM1A, clone 7F12 antibody (Cat. No. MAB S415; Millipore, Burlington, Mass., USA), and anti-PPM1A clone 4E11 (Cat. No. SAB1402318, Sigma-Aldrich, Burlington, Mass., USA).

[0168] PPM1A small molecule inhibitors include the plant alkaloid sanguinarine (see Aburai et al. (2010) “Sanguinarine as a potent and specific inhibitor of protein phosphatase 2C in vitro and induces apoptosis via phosphorylation of p38 in HL60 cells” Biosci Biotechnol Biochem. 74(3):548-52). Additional PPM1A small molecule inhibitors include proteolysis targeting chimera (PROTACS), such as a PROTACS that induces proteolysis of PPM1A protein.

[0169] PPM1A Antisense Therapeutics

[0170] Antisense therapeutics are a class of nucleic acid-based compounds that can be used to inhibit gene expression. Antisense therapeutics may be single- or double-stranded deoxyribonucleic acid (DNA)-based, ribonucleic acid (RNA)-based, or DNA/RNA chemical analogue compounds. In general, antisense therapeutics are designed to include a nucleotide sequence that is complementary or nearly complementary to an mRNA or pre-mRNA sequence transcribed from a given gene in order to promote binding between the antisense therapeutic and the pre-mRNA or mRNA. Without being bound by theory, it is believed that in most instances antisense therapeutics act by binding to an mRNA or pre-mRNA, thereby inhibiting protein translation, altering pre-mRNA splicing into mature mRNA, and/or causing destruction of mRNA. In most instances, the antisense therapeutic nucleotide sequence is complementary to a portion of a targeted gene's or mRNA's sense sequence. PPM1A antisense therapeutics described herein are oligonucleotide-based compounds that include an oligonucleotide sequence complementary to a PPM1A gene sense, PPM1A pre-mRNA sense, and/or PPM1A mRNA sense sequence, or a portion thereof PPM1A antisense therapeutics described herein can also be nucleotide chemical analog-based compounds capable of binding to a PPM1A gene sense, PPM1A pre-mRNA sense, and/or PPM1A mRNA sense sequence, or a portion thereof PPM1A antisense therapeutics include PPM1A antisense oligonucleotides, PPM1A shRNAs, PPM1A siRNAs, PPM1A PNAs, PPM1A LNAs, and PPM1A morpholino oligomers.

[0171] Antisense oligonucleotides (AONs) are short oligonucleotide-based sequences that include an oligonucleotide sequence complementary to a target RNA sequence. AONs are typically between 8 to 50 nucleotides in length, for example, 20 nucleotides in length. AONs may include chemically modified nucleosides (for example, 2′-O-methylated nucleosides or 2′-O-(2-methoxyethyl) nucleosides) as well as modified internucleoside linkages (for example, phosphorothioate linkages). PPM1A AONs described herein include oligonucleotide sequences that are complementary to PPM1A RNA sequences, such as PPM1A mRNA transcripts. PPM1A AONs described herein can include chemically modified nucleosides and modified internucleoside linkages (for example, phosphorothioate linkages).

[0172] Peptide nucleic acids (PNAs) are short, artificially synthesized polymers with a structure that mimics DNA or RNA. PNAs include a backbone composed of repeating N-(2-aminoethyl)-glycine units linked by peptide bonds. PPM1A PNAs described herein can be used as antisense therapeutics that bind to PPM1A RNA sequences with high specificity and inhibit PPM1A gene expression.

[0173] Locked nucleic acids (LNAs) are oligonucleotide sequences that include one or more modified RNA nucleotides in which the ribose moiety is modified with an extra bridge connecting the 2′ oxygen and 4′ carbon. LNAs are believed to have higher Tm's than analogous oligonucleotide sequences. PPM1A LNAs described herein can be used as antisense therapeutics that bind to PPM1A RNA sequences with high specificity and inhibit PPM1A gene expression.

[0174] Morpholino oligomers are oligonucleotide compounds that include DNA bases attached to a backbone of methylenemorpholine rings linked through phosphorodiamidate groups. Morpholino oligomers of the present invention can be designed to bind to specific PPM1A RNA sequences of interest (for example, PPM1A mRNA or PPM1A pre-mRNA sequences of interest), thereby preventing gene expression. PPM1A morpholino oligomers described herein can be used as antisense therapeutics that bind to PPM1A mRNA sequences with high specificity and inhibit PPM1A gene expression. PPM1A morpholino oligomers described herein can also be used to bind PPM1A pre-mRNA sequences, altering PPM1A pre-mRNA splicing and PPM1A gene expression.

[0175] Small hairpin RNAs (shRNAs) are generally RNA molecules with a hairpin-like structure that can be used to silence gene expression. shRNAs are generally expressed from plasmids encoding the shRNA sequence, and can be expressed from viral vectors to allow lentiviral, adenoviral, or adeno-associated viral expression. Without being bound by theory, it is believed that shRNA inhibits gene expression by taking advantage of RNA interference (RNAi) processes. In brief, the shRNA transcript is processed by Drosha and Dicer, and then loaded onto the RNA-induced silencing complex (RISC), allowing targeting of specific mRNA, and either mRNA degradation or repression of protein translation. PPM1A shRNAs described herein can inhibit gene expression of PPM1A.

[0176] Small interfering RNAs (siRNAs) are double-stranded RNA molecules of approximately 20-25 base pairs in length that take advantage of RNAi machinery (e.g., Drosha and RISC) to bind and target mRNA for degradation. siRNAs are not dependent upon plasmids or vectors for expression, and can generally be delivered directly to a target cell, for instance, by transfection. PPM1A siRNAs are double-stranded RNA sequences that include an RNA sequence complementary to a PPM1A mRNA sequence, and which prevent PPM1A protein translation.

[0177] The number of nucleotides included in a PPM1A antisense therapeutic, for example, a PPM1A antisense oligonucleotide described herein may vary. For example, in some embodiments, the antisense oligonucleotide is from 12 to 15 nucleotides in length. In some embodiments, the antisense oligonucleotide is from 15 to 20 nucleotides in length. In some embodiments, the antisense oligonucleotide is from 20 to 40 nucleotides in length. In some embodiments, the antisense oligonucleotide is from 20 to 22 nucleotides in length. In some embodiments, the antisense oligonucleotide is from 22 to 40 nucleotides in length. In some embodiments, the antisense oligonucleotide is from 20 to 30, 25 to 35, or 30 to 40 nucleotides in length.

[0178] PPM1A Antisense Oligonucleotides

[0179] PPM1A antisense oligonucleotides (AONs) described herein are short synthetic oligonucleotide sequence complementary to a portion of a PPM1A gene product, such as a PPM1A transcript (for example, a PPM1A mRNA transcript).

[0180] In various embodiments, PPM1A AONs include linked nucleosides with a nucleobase sequence that is at least 90%, at least 91%, at least 92%, at least 93%, at least 94%, at least 95%, at least 96%, at least 97%, at least 98%, at least 99%, or that is 100% complementary to a portion of a PPM1A gene product, such as a PPM1A mRNA sequence. In some embodiments, a PPM1A AON can include a non-duplexed oligonucleotide. In some embodiments, a PPM1A AON can include a duplex of two oligonucleotides where the first oligonucleotide includes a nucleotide sequence that is completely or almost completely complementary to a PPM1A mRNA sequence and the second oligonucleotide includes a nucleotide sequence that is complementary to the nucleotide sequence of the first oligonucleotide. AON binding specificity can be assessed via measurement of parameters such as dissociation constant, melting temperature (Tm), or other criteria such as changes in protein or RNA expression levels or other assays that measure PPM1A activity or expression.

[0181] A PPM1A AON, such as disclosed herein, may be an oligonucleotide sequence of 5 to 100 nucleotides in length, for example, 10 to 40 nucleotides in length, for example, 14 to 40 nucleotides in length, 10 to 30 nucleotides in length, for example, 14 to 30 nucleotides in length, for example, 14 to 25 nucleotides in length, 15 to 22 nucleotides in length, 18 to 21 nucleotides in length, or 18, 19, 20, 21, 22, 23, 24, or 25 nucleotides in length.

[0182] PPM1A AONs described herein also include antisense oligonucleotides comprising the oligonucleotide sequences listed in Table 1 below. The “Start Position” column in Table 1 refers to the first position in the PPM1A mRNA transcript (SEQ ID NO: 2864) that the PPM1A AON sequence is complementary to. As an example, oligonucleotide sequence with a “Start Position” of 457 is complementary to a first nucleotide at position 457 of SEQ ID NO: 2864.

TABLE 1
PPM1A AON Sequences and Corresponding
Target Sequences

| SEQ | Start | PPM1A AON | SEQ | |
|---|---|---|---|---|
| ID | Posi- | sequence | ID | Target Sequence |
| NO: | tion | (5′→3′)* | NO: | (5′→3′) |
| 2 | 457 | ATGTCTTGATCCTCTAGGTC | 956 | GACCTAGAGGATCAAGACAT |
| 3 | 458 | TATGTCTTGATCCTCTAGGT | 957 | ACCTAGAGGATCAAGACATA |
| 4 | 459 | TTATGTCTTGATCCTCTAGG | 958 | CCTAGAGGATCAAGACATAA |
| 5 | 460 | ATTATGTCTTGATCCTCTAG | 959 | CTAGAGGATCAAGACATAAT |
| 6 | 461 | CATTATGTCTTGATCCTCTA | 960 | TAGAGGATCAAGACATAATG |
| 7 | 462 | CCATTATGTCTTGATCCTCT | 961 | AGAGGATCAAGACATAATGG |
| 8 | 463 | CCCATTATGTCTTGATCCTC | 962 | GAGGATCAAGACATAATGGG |
| 9 | 464 | TCCCATTATGTCTTGATCCT | 963 | AGGATCAAGACATAATGGGA |
| 10 | 465 | CTCCCATTATGTCTTGATCC | 964 | GGATCAAGACATAATGGGAG |
| 11 | 466 | GCTCCCATTATGTCTTGATC | 965 | GATCAAGACATAATGGGAGC |
| 12 | 467 | TGCTCCCATTATGTCTTGAT | 966 | ATCAAGACATAATGGGAGCA |
| 13 | 468 | ATGCTCCCATTATGTCTTGA | 967 | TCAAGACATAATGGGAGCAT |
| 14 | 469 | AATGCTCCCATTATGTCTTG | 968 | CAAGACATAATGGGAGCATT |
| 15 | 470 | AAATGCTCCCATTATGTCTT | 969 | AAGACATAATGGGAGCATTT |
| 16 | 471 | AAAATGCTCCCATTATGTCT | 970 | AGACATAATGGGAGCATTTT |
| 17 | 472 | AAAAATGCTCCCATTATGTC | 971 | GACATAATGGGAGCATTTTT |
| 18 | 473 | TAAAAATGCTCCCATTATGT | 972 | ACATAATGGGAGCATTTTTA |
| 19 | 474 | CTAAAAATGCTCCCATTATG | 973 | CATAATGGGAGCATTTTTAG |
| 20 | 475 | TCTAAAAATGCTCCCATTAT | 974 | ATAATGGGAGCATTTTTAGA |
| 21 | 476 | GTCTAAAAATGCTCCCATTA | 975 | TAATGGGAGCATTTTTAGAC |
| 22 | 477 | TGTCTAAAAATGCTCCCATT | 976 | AATGGGAGCATTTTTAGACA |
| 23 | 478 | TTGTCTAAAAATGCTCCCAT | 977 | ATGGGAGCATTTTTAGACAA |
| 24 | 479 | CTTGTCTAAAAATGCTCCCA | 978 | TGGGAGCATTTTTAGACAAG |
| 25 | 480 | GCTTGTCTAAAAATGCTCCC | 979 | GGGAGCATTTTTAGACAAGC |
| 26 | 481 | GGCTTGTCTAAAAATGCTCC | 980 | GGAGCATTTTTAGACAAGCC |
| 27 | 482 | TGGCTTGTCTAAAAATGCTC | 981 | GAGCATTTTTAGACAAGCCA |
| 28 | 483 | TTGGCTTGTCTAAAAATGCT | 982 | AGCATTTTTAGACAAGCCAA |
| 29 | 484 | TTTGGCTTGTCTAAAAATGC | 983 | GCATTTTTAGACAAGCCAAA |
| 30 | 485 | CTTTGGCTTGTCTAAAAATG | 984 | CATTTTTAGACAAGCCAAAG |
| 31 | 486 | TCTTTGGCTTGTCTAAAAAT | 985 | ATTTTTAGACAAGCCAAAGA |
| 32 | 487 | ATCTTTGGCTTGTCTAAAAA | 986 | TTTTTAGACAAGCCAAAGAT |
| 33 | 488 | CATCTTTGGCTTGTCTAAAA | 987 | TTTTAGACAAGCCAAAGATG |
| 34 | 489 | CCATCTTTGGCTTGTCTAAA | 988 | TTTAGACAAGCCAAAGATGG |
| 35 | 490 | TCCATCTTTGGCTTGTCTAA | 989 | TTAGACAAGCCAAAGATGGA |
| 36 | 491 | TTCCATCTTTGGCTTGTCTA | 990 | TAGACAAGCCAAAGATGGAA |
| 37 | 492 | TTTCCATCTTTGGCTTGTCT | 991 | AGACAAGCCAAAGATGGAAA |
| 38 | 493 | TTTTCCATCTTTGGCTTGTC | 992 | GACAAGCCAAAGATGGAAAA |
| 39 | 494 | CTTTTCCATCTTTGGCTTGT | 993 | ACAAGCCAAAGATGGAAAAG |
| 40 | 495 | GCTTTTCCATCTTTGGCTTG | 994 | CAAGCCAAAGATGGAAAAGC |
| 41 | 496 | TGCTTTTCCATCTTTGGCTT | 995 | AAGCCAAAGATGGAAAAGCA |
| 42 | 497 | ATGCTTTTCCATCTTTGGCT | 996 | AGCCAAAGATGGAAAAGCAT |
| 43 | 498 | TATGCTTTTCCATCTTTGGC | 997 | GCCAAAGATGGAAAAGCATA |
| 44 | 499 | TTATGCTTTTCCATCTTTGG | 998 | CCAAAGATGGAAAAGCATAA |
| 45 | 500 | ATTATGCTTTTCCATCTTTG | 999 | CAAAGATGGAAAAGCATAAT |
| 46 | 501 | CATTATGCTTTTCCATCTTT | 1000 | AAAGATGGAAAAGCATAATG |
| 47 | 502 | GCATTATGCTTTTCCATCTT | 1001 | AAGATGGAAAAGCATAATGC |
| 48 | 503 | GGCATTATGCTTTTCCATCT | 1002 | AGATGGAAAAGCATAATGCC |
| 49 | 504 | GGGCATTATGCTTTTCCATC | 1003 | GATGGAAAAGCATAATGCCC |
| 50 | 505 | TGGGCATTATGCTTTTCCAT | 1004 | ATGGAAAAGCATAATGCCCA |
| 51 | 506 | CTGGGCATTATGCTTTTCCA | 1005 | TGGAAAAGCATAATGCCCAG |
| 52 | 507 | CCTGGGCATTATGCTTTTCC | 1006 | GGAAAAGCATAATGCCCAGG |
| 53 | 508 | CCCTGGGCATTATGCTTTTC | 1007 | GAAAAGCATAATGCCCAGGG |
| 54 | 509 | CCCCTGGGCATTATGCTTTT | 1008 | AAAAGCATAATGCCCAGGGG |
| 55 | 510 | GCCCCTGGGCATTATGCTTT | 1009 | AAAGCATAATGCCCAGGGGC |
| 56 | 511 | TGCCCCTGGGCATTATGCTT | 1010 | AAGCATAATGCCCAGGGGCA |
| 57 | 512 | CTGCCCCTGGGCATTATGCT | 1011 | AGCATAATGCCCAGGGGCAG |
| 58 | 513 | CCTGCCCCTGGGCATTATGC | 1012 | GCATAATGCCCAGGGGCAGG |
| 59 | 514 | CCCTGCCCCTGGGCATTATG | 1013 | CATAATGCCCAGGGGCAGGG |
| 60 | 515 | ACCCTGCCCCTGGGCATTAT | 1014 | ATAATGCCCAGGGGCAGGGT |
| 61 | 516 | TACCCTGCCCCTGGGCATTA | 1015 | TAATGCCCAGGGGCAGGGTA |
| 62 | 517 | TTACCCTGCCCCTGGGCATT | 1016 | AATGCCCAGGGGCAGGGTAA |
| 63 | 518 | ATTACCCTGCCCCTGGGCAT | 1017 | ATGCCCAGGGGCAGGGTAAT |
| 64 | 519 | CATTACCCTGCCCCTGGGCA | 1018 | TGCCCAGGGGCAGGGTAATG |
| 65 | 520 | CCATTACCCTGCCCCTGGGC | 1019 | GCCCAGGGGCAGGGTAATGG |
| 66 | 521 | CCCATTACCCTGCCCCTGGG | 1020 | CCCAGGGGCAGGGTAATGGG |
| 67 | 522 | ACCCATTACCCTGCCCCTGG | 1021 | CCAGGGGCAGGGTAATGGGT |
| 68 | 523 | AACCCATTACCCTGCCCCTG | 1022 | CAGGGGCAGGGTAATGGGTT |
| 69 | 524 | CAACCCATTACCCTGCCCCT | 1023 | AGGGGCAGGGTAATGGGTTG |
| 70 | 525 | GCAACCCATTACCCTGCCCC | 1024 | GGGGCAGGGTAATGGGTTGC |
| 71 | 526 | CGCAACCCATTACCCTGCCC | 1025 | GGGCAGGGTAATGGGTTGCG |
| 72 | 527 | TCGCAACCCATTACCCTGCC | 1026 | GGCAGGGTAATGGGTTGCGA |
| 73 | 528 | ATCGCAACCCATTACCCTGC | 1027 | GCAGGGTAATGGGTTGCGAT |
| 74 | 529 | TATCGCAACCCATTACCCTG | 1028 | CAGGGTAATGGGTTGCGATA |
| 75 | 530 | ATATCGCAACCCATTACCCT | 1029 | AGGGTAATGGGTTGCGATAT |
| 76 | 531 | CATATCGCAACCCATTACCC | 1030 | GGGTAATGGGTTGCGATATG |
| 77 | 532 | CCATATCGCAACCCATTACC | 1031 | GGTAATGGGTTGCGATATGG |
| 78 | 533 | CCCATATCGCAACCCATTAC | 1032 | GTAATGGGTTGCGATATGGG |
| 79 | 534 | GCCCATATCGCAACCCATTA | 1033 | TAATGGGTTGCGATATGGGC |
| 80 | 535 | AGCCCATATCGCAACCCATT | 1034 | AATGGGTTGCGATATGGGCT |
| 81 | 536 | TAGCCCATATCGCAACCCAT | 1035 | ATGGGTTGCGATATGGGCTA |
| 82 | 537 | TTAGCCCATATCGCAACCCA | 1036 | TGGGTTGCGATATGGGCTAA |
| 83 | 538 | CTTAGCCCATATCGCAACCC | 1037 | GGGTTGCGATATGGGCTAAG |
| 84 | 539 | GCTTAGCCCATATCGCAACC | 1038 | GGTTGCGATATGGGCTAAGC |
| 85 | 540 | TGCTTAGCCCATATCGCAAC | 1039 | GTTGCGATATGGGCTAAGCA |
| 86 | 541 | CTGCTTAGCCCATATCGCAA | 1040 | TTGCGATATGGGCTAAGCAG |
| 87 | 542 | GCTGCTTAGCCCATATCGCA | 1041 | TGCGATATGGGCTAAGCAGC |
| 88 | 543 | TGCTGCTTAGCCCATATCGC | 1042 | GCGATATGGGCTAAGCAGCA |
| 89 | 544 | ATGCTGCTTAGCCCATATCG | 1043 | CGATATGGGCTAAGCAGCAT |
| 90 | 545 | CATGCTGCTTAGCCCATATC | 1044 | GATATGGGCTAAGCAGCATG |
| 91 | 546 | GCATGCTGCTTAGCCCATAT | 1045 | ATATGGGCTAAGCAGCATGC |
| 92 | 547 | TGCATGCTGCTTAGCCCATA | 1046 | TATGGGCTAAGCAGCATGCA |
| 93 | 548 | TTGCATGCTGCTTAGCCCAT | 1047 | ATGGGCTAAGCAGCATGCAA |
| 94 | 549 | CTTGCATGCTGCTTAGCCCA | 1048 | TGGGCTAAGCAGCATGCAAG |
| 95 | 550 | CCTTGCATGCTGCTTAGCCC | 1049 | GGGCTAAGCAGCATGCAAGG |
| 96 | 551 | GCCTTGCATGCTGCTTAGCC | 1050 | GGCTAAGCAGCATGCAAGGC |
| 97 | 552 | AGCCTTGCATGCTGCTTAGC | 1051 | GCTAAGCAGCATGCAAGGCT |
| 98 | 553 | CAGCCTTGCATGCTGCTTAG | 1052 | CTAAGCAGCATGCAAGGCTG |
| 99 | 554 | CCAGCCTTGCATGCTGCTTA | 1053 | TAAGCAGCATGCAAGGCTGG |
| 100 | 555 | GCCAGCCTTGCATGCTGCTT | 1054 | AAGCAGCATGCAAGGCTGGC |
| 101 | 556 | CGCCAGCCTTGCATGCTGCT | 1055 | AGCAGCATGCAAGGCTGGCG |
| 102 | 557 | ACGCCAGCCTTGCATGCTGC | 1056 | GCAGCATGCAAGGCTGGCGT |
| 103 | 558 | CACGCCAGCCTTGCATGCTG | 1057 | CAGCATGCAAGGCTGGCGTG |
| 104 | 559 | ACACGCCAGCCTTGCATGCT | 1058 | AGCATGCAAGGCTGGCGTGT |
| 105 | 560 | AACACGCCAGCCTTGCATGC | 1059 | GCATGCAAGGCTGGCGTGTT |
| 106 | 561 | CAACACGCCAGCCTTGCATG | 1060 | CATGCAAGGCTGGCGTGTTG |
| 107 | 562 | TCAACACGCCAGCCTTGCAT | 1061 | ATGCAAGGCTGGCGTGTTGA |
| 108 | 563 | TTCAACACGCCAGCCTTGCA | 1062 | TGCAAGGCTGGCGTGTTGAA |
| 109 | 564 | TTTCAACACGCCAGCCTTGC | 1063 | GCAAGGCTGGCGTGTTGAAA |
| 110 | 565 | ATTTCAACACGCCAGCCTTG | 1064 | CAAGGCTGGCGTGTTGAAAT |
| 111 | 566 | CATTTCAACACGCCAGCCTT | 1065 | AAGGCTGGCGTGTTGAAATG |
| 112 | 567 | CCATTTCAACACGCCAGCCT | 1066 | AGGCTGGCGTGTTGAAATGG |
| 113 | 568 | TCCATTTCAACACGCCAGCC | 1067 | GGCTGGCGTGTTGAAATGGA |
| 114 | 569 | CTCCATTTCAACACGCCAGC | 1068 | GCTGGCGTGTTGAAATGGAG |
| 115 | 570 | CCTCCATTTCAACACGCCAG | 1069 | CTGGCGTGTTGAAATGGAGG |
| 116 | 571 | TCCTCCATTTCAACACGCCA | 1070 | TGGCGTGTTGAAATGGAGGA |
| 117 | 572 | ATCCTCCATTTCAACACGCC | 1071 | GGCGTGTTGAAATGGAGGAT |
| 118 | 573 | CATCCTCCATTTCAACACGC | 1072 | GCGTGTTGAAATGGAGGATG |
| 119 | 574 | GCATCCTCCATTTCAACACG | 1073 | CGTGTTGAAATGGAGGATGC |
| 120 | 575 | TGCATCCTCCATTTCAACAC | 1074 | GTGTTGAAATGGAGGATGCA |
| 121 | 576 | GTGCATCCTCCATTTCAACA | 1075 | TGTTGAAATGGAGGATGCAC |
| 122 | 577 | TGTGCATCCTCCATTTCAAC | 1076 | GTTGAAATGGAGGATGCACA |
| 123 | 578 | ATGTGCATCCTCCATTTCAA | 1077 | TTGAAATGGAGGATGCACAT |
| 124 | 579 | TATGTGCATCCTCCATTTCA | 1078 | TGAAATGGAGGATGCACATA |
| 125 | 580 | GTATGTGCATCCTCCATTTC | 1079 | GAAATGGAGGATGCACATAC |
| 126 | 581 | CGTATGTGCATCCTCCATTT | 1080 | AAATGGAGGATGCACATACG |
| 127 | 582 | CCGTATGTGCATCCTCCATT | 1081 | AATGGAGGATGCACATACGG |
| 128 | 583 | GCCGTATGTGCATCCTCCAT | 1082 | ATGGAGGATGCACATACGGC |
| 129 | 584 | AGCCGTATGTGCATCCTCCA | 1083 | TGGAGGATGCACATACGGCT |
| 130 | 585 | CAGCCGTATGTGCATCCTCC | 1084 | GGAGGATGCACATACGGCTG |
| 131 | 586 | ACAGCCGTATGTGCATCCTC | 1085 | GAGGATGCACATACGGCTGT |
| 132 | 587 | CACAGCCGTATGTGCATCCT | 1086 | AGGATGCACATACGGCTGTG |
| 133 | 588 | TCACAGCCGTATGTGCATCC | 1087 | GGATGCACATACGGCTGTGA |
| 134 | 589 | ATCACAGCCGTATGTGCATC | 1088 | GATGCACATACGGCTGTGAT |
| 135 | 590 | GATCACAGCCGTATGTGCAT | 1089 | ATGCACATACGGCTGTGATC |
| 136 | 591 | CGATCACAGCCGTATGTGCA | 1090 | TGCACATACGGCTGTGATCG |
| 137 | 592 | CCGATCACAGCCGTATGTGC | 1091 | GCACATACGGCTGTGATCGG |
| 138 | 593 | ACCGATCACAGCCGTATGTG | 1092 | CACATACGGCTGTGATCGGT |
| 139 | 594 | AACCGATCACAGCCGTATGT | 1093 | ACATACGGCTGTGATCGGTT |
| 140 | 595 | AAACCGATCACAGCCGTATG | 1094 | CATACGGCTGTGATCGGTTT |
| 141 | 596 | CAAACCGATCACAGCCGTAT | 1095 | ATACGGCTGTGATCGGTTTG |
| 142 | 597 | GCAAACCGATCACAGCCGTA | 1096 | TACGGCTGTGATCGGTTTGC |
| 143 | 598 | GGCAAACCGATCACAGCCGT | 1097 | ACGGCTGTGATCGGTTTGCC |
| 144 | 599 | TGGCAAACCGATCACAGCCG | 1098 | CGGCTGTGATCGGTTTGCCA |
| 145 | 600 | TTGGCAAACCGATCACAGCC | 1099 | GGCTGTGATCGGTTTGCCAA |
| 146 | 601 | CTTGGCAAACCGATCACAGC | 1100 | GCTGTGATCGGTTTGCCAAG |
| 147 | 602 | ACTTGGCAAACCGATCACAG | 1101 | CTGTGATCGGTTTGCCAAGT |
| 148 | 603 | CACTTGGCAAACCGATCACA | 1102 | TGTGATCGGTTTGCCAAGTG |
| 149 | 604 | CCACTTGGCAAACCGATCAC | 1103 | GTGATCGGTTTGCCAAGTGG |
| 150 | 605 | TCCACTTGGCAAACCGATCA | 1104 | TGATCGGTTTGCCAAGTGGA |
| 151 | 606 | GTCCACTTGGCAAACCGATC | 1105 | GATCGGTTTGCCAAGTGGAC |
| 152 | 607 | AGTCCACTTGGCAAACCGAT | 1106 | ATCGGTTTGCCAAGTGGACT |
| 153 | 608 | AAGTCCACTTGGCAAACCGA | 1107 | TCGGTTTGCCAAGTGGACTT |
| 154 | 609 | CAAGTCCACTTGGCAAACCG | 1108 | CGGTTTGCCAAGTGGACTTG |
| 155 | 610 | TCAAGTCCACTTGGCAAACC | 1109 | GGTTTGCCAAGTGGACTTGA |
| 156 | 611 | TTCAAGTCCACTTGGCAAAC | 1110 | GTTTGCCAAGTGGACTTGAA |
| 157 | 612 | ATTCAAGTCCACTTGGCAAA | 1111 | TTTGCCAAGTGGACTTGAAT |
| 158 | 613 | GATTCAAGTCCACTTGGCAA | 1112 | TTGCCAAGTGGACTTGAATC |
| 159 | 614 | CGATTCAAGTCCACTTGGCA | 1113 | TGCCAAGTGGACTTGAATCG |
| 160 | 615 | ACGATTCAAGTCCACTTGGC | 1114 | GCCAAGTGGACTTGAATCGT |
| 161 | 616 | CACGATTCAAGTCCACTTGG | 1115 | CCAAGTGGACTTGAATCGTG |
| 162 | 617 | CCACGATTCAAGTCCACTTG | 1116 | CAAGTGGACTTGAATCGTGG |
| 163 | 618 | ACCACGATTCAAGTCCACTT | 1117 | AAGTGGACTTGAATCGTGGT |
| 164 | 619 | GACCACGATTCAAGTCCACT | 1118 | AGTGGACTTGAATCGTGGTC |
| 165 | 620 | TGACCACGATTCAAGTCCAC | 1119 | GTGGACTTGAATCGTGGTCA |
| 166 | 621 | ATGACCACGATTCAAGTCCA | 1120 | TGGACTTGAATCGTGGTCAT |
| 167 | 622 | AATGACCACGATTCAAGTCC | 1121 | GGACTTGAATCGTGGTCATT |
| 168 | 623 | GAATGACCACGATTCAAGTC | 1122 | GACTTGAATCGTGGTCATTC |
| 169 | 624 | AGAATGACCACGATTCAAGT | 1123 | ACTTGAATCGTGGTCATTCT |
| 170 | 625 | AAGAATGACCACGATTCAAG | 1124 | CTTGAATCGTGGTCATTCTT |
| 171 | 626 | AAAGAATGACCACGATTCAA | 1125 | TTGAATCGTGGTCATTCTTT |
| 172 | 627 | CAAAGAATGACCACGATTCA | 1126 | TGAATCGTGGTCATTCTTTG |
| 173 | 628 | GCAAAGAATGACCACGATTC | 1127 | GAATCGTGGTCATTCTTTGC |
| 174 | 629 | AGCAAAGAATGACCACGATT | 1128 | AATCGTGGTCATTCTTTGCT |
| 175 | 630 | CAGCAAAGAATGACCACGAT | 1129 | ATCGTGGTCATTCTTTGCTG |
| 176 | 631 | ACAGCAAAGAATGACCACGA | 1130 | TCGTGGTCATTCTTTGCTGT |
| 177 | 632 | CACAGCAAAGAATGACCACG | 1131 | CGTGGTCATTCTTTGCTGTG |
| 178 | 633 | ACACAGCAAAGAATGACCAC | 1132 | GTGGTCATTCTTTGCTGTGT |
| 179 | 634 | TACACAGCAAAGAATGACCA | 1133 | TGGTCATTCTTTGCTGTGTA |
| 180 | 635 | ATACACAGCAAAGAATGACC | 1134 | GGTCATTCTTTGCTGTGTAT |
| 181 | 636 | CATACACAGCAAAGAATGAC | 1135 | GTCATTCTTTGCTGTGTATG |
| 182 | 637 | TCATACACAGCAAAGAATGA | 1136 | TCATTCTTTGCTGTGTATGA |
| 183 | 638 | ATCATACACAGCAAAGAATG | 1137 | CATTCTTTGCTGTGTATGAT |
| 184 | 639 | CATCATACACAGCAAAGAAT | 1138 | ATTCTTTGCTGTGTATGATG |
| 185 | 640 | CCATCATACACAGCAAAGAA | 1139 | TTCTTTGCTGTGTATGATGG |
| 186 | 641 | CCCATCATACACAGCAAAGA | 1140 | TCTTTGCTGTGTATGATGGG |
| 187 | 642 | GCCCATCATACACAGCAAAG | 1141 | CTTTGCTGTGTATGATGGGC |
| 188 | 643 | TGCCCATCATACACAGCAAA | 1142 | TTTGCTGTGTATGATGGGCA |
| 189 | 644 | ATGCCCATCATACACAGCAA | 1143 | TTGCTGTGTATGATGGGCAT |
| 190 | 645 | CATGCCCATCATACACAGCA | 1144 | TGCTGTGTATGATGGGCATG |
| 191 | 646 | GCATGCCCATCATACACAGC | 1145 | GCTGTGTATGATGGGCATGC |
| 192 | 647 | AGCATGCCCATCATACACAG | 1146 | CTGTGTATGATGGGCATGCT |
| 193 | 648 | CAGCATGCCCATCATACACA | 1147 | TGTGTATGATGGGCATGCTG |
| 194 | 649 | CCAGCATGCCCATCATACAC | 1148 | GTGTATGATGGGCATGCTGG |
| 195 | 650 | ACCAGCATGCCCATCATACA | 1149 | TGTATGATGGGCATGCTGGT |
| 196 | 651 | AACCAGCATGCCCATCATAC | 1150 | GTATGATGGGCATGCTGGTT |
| 197 | 652 | GAACCAGCATGCCCATCATA | 1151 | TATGATGGGCATGCTGGTTC |
| 198 | 653 | AGAACCAGCATGCCCATCAT | 1152 | ATGATGGGCATGCTGGTTCT |
| 199 | 654 | GAGAACCAGCATGCCCATCA | 1153 | TGATGGGCATGCTGGTTCTC |
| 200 | 655 | TGAGAACCAGCATGCCCATC | 1154 | GATGGGCATGCTGGTTCTCA |
| 201 | 656 | CTGAGAACCAGCATGCCCAT | 1155 | ATGGGCATGCTGGTTCTCAG |
| 202 | 657 | CCTGAGAACCAGCATGCCCA | 1156 | TGGGCATGCTGGTTCTCAGG |
| 203 | 658 | ACCTGAGAACCAGCATGCCC | 1157 | GGGCATGCTGGTTCTCAGGT |
| 204 | 659 | AACCTGAGAACCAGCATGCC | 1158 | GGCATGCTGGTTCTCAGGTT |
| 205 | 660 | CAACCTGAGAACCAGCATGC | 1159 | GCATGCTGGTTCTCAGGTTG |
| 206 | 661 | GCAACCTGAGAACCAGCATG | 1160 | CATGCTGGTTCTCAGGTTGC |
| 207 | 662 | GGCAACCTGAGAACCAGCAT | 1161 | ATGCTGGTTCTCAGGTTGCC |
| 208 | 663 | TGGCAACCTGAGAACCAGCA | 1162 | TGCTGGTTCTCAGGTTGCCA |
| 209 | 664 | TTGGCAACCTGAGAACCAGC | 1163 | GCTGGTTCTCAGGTTGCCAA |
| 210 | 665 | TTTGGCAACCTGAGAACCAG | 1164 | CTGGTTCTCAGGTTGCCAAA |
| 211 | 666 | ATTTGGCAACCTGAGAACCA | 1165 | TGGTTCTCAGGTTGCCAAAT |
| 212 | 667 | TATTTGGCAACCTGAGAACC | 1166 | GGTTCTCAGGTTGCCAAATA |
| 213 | 668 | GTATTTGGCAACCTGAGAAC | 1167 | GTTCTCAGGTTGCCAAATAC |
| 214 | 669 | AGTATTTGGCAACCTGAGAA | 1168 | TTCTCAGGTTGCCAAATACT |
| 215 | 670 | CAGTATTTGGCAACCTGAGA | 1169 | TCTCAGGTTGCCAAATACTG |
| 216 | 671 | GCAGTATTTGGCAACCTGAG | 1170 | CTCAGGTTGCCAAATACTGC |
| 217 | 672 | AGCAGTATTTGGCAACCTGA | 1171 | TCAGGTTGCCAAATACTGCT |
| 218 | 673 | CAGCAGTATTTGGCAACCTG | 1172 | CAGGTTGCCAAATACTGCTG |
| 219 | 674 | ACAGCAGTATTTGGCAACCT | 1173 | AGGTTGCCAAATACTGCTGT |
| 220 | 675 | CACAGCAGTATTTGGCAACC | 1174 | GGTTGCCAAATACTGCTGTG |
| 221 | 676 | TCACAGCAGTATTTGGCAAC | 1175 | GTTGCCAAATACTGCTGTGA |
| 222 | 677 | CTCACAGCAGTATTTGGCAA | 1176 | TTGCCAAATACTGCTGTGAG |
| 223 | 678 | GCTCACAGCAGTATTTGGCA | 1177 | TGCCAAATACTGCTGTGAGC |
| 224 | 679 | TGCTCACAGCAGTATTTGGC | 1178 | GCCAAATACTGCTGTGAGCA |
| 225 | 680 | ATGCTCACAGCAGTATTTGG | 1179 | CCAAATACTGCTGTGAGCAT |
| 226 | 681 | AATGCTCACAGCAGTATTTG | 1180 | CAAATACTGCTGTGAGCATT |
| 227 | 682 | AAATGCTCACAGCAGTATTT | 1181 | AAATACTGCTGTGAGCATTT |
| 228 | 683 | CAAATGCTCACAGCAGTATT | 1182 | AATACTGCTGTGAGCATTTG |
| 229 | 684 | ACAAATGCTCACAGCAGTAT | 1183 | ATACTGCTGTGAGCATTTGT |
| 230 | 685 | AACAAATGCTCACAGCAGTA | 1184 | TACTGCTGTGAGCATTTGTT |
| 231 | 686 | TAACAAATGCTCACAGCAGT | 1185 | ACTGCTGTGAGCATTTGTTA |
| 232 | 687 | CTAACAAATGCTCACAGCAG | 1186 | CTGCTGTGAGCATTTGTTAG |
| 233 | 688 | TCTAACAAATGCTCACAGCA | 1187 | TGCTGTGAGCATTTGTTAGA |
| 234 | 689 | ATCTAACAAATGCTCACAGC | 1188 | GCTGTGAGCATTTGTTAGAT |
| 235 | 690 | GATCTAACAAATGCTCACAG | 1189 | CTGTGAGCATTTGTTAGATC |
| 236 | 691 | TGATCTAACAAATGCTCACA | 1190 | TGTGAGCATTTGTTAGATCA |
| 237 | 692 | GTGATCTAACAAATGCTCAC | 1191 | GTGAGCATTTGTTAGATCAC |
| 238 | 693 | TGTGATCTAACAAATGCTCA | 1192 | TGAGCATTTGTTAGATCACA |
| 239 | 694 | ATGTGATCTAACAAATGCTC | 1193 | GAGCATTTGTTAGATCACAT |
| 240 | 695 | GATGTGATCTAACAAATGCT | 1194 | AGCATTTGTTAGATCACATC |
| 241 | 696 | TGATGTGATCTAACAAATGC | 1195 | GCATTTGTTAGATCACATCA |
| 242 | 697 | GTGATGTGATCTAACAAATG | 1196 | CATTTGTTAGATCACATCAC |
| 243 | 698 | GGTGATGTGATCTAACAAAT | 1197 | ATTTGTTAGATCACATCACC |
| 244 | 699 | TGGTGATGTGATCTAACAAA | 1198 | TTTGTTAGATCACATCACCA |
| 245 | 700 | TTGGTGATGTGATCTAACAA | 1199 | TTGTTAGATCACATCACCAA |
| 246 | 701 | ATTGGTGATGTGATCTAACA | 1200 | TGTTAGATCACATCACCAAT |
| 247 | 702 | TATTGGTGATGTGATCTAAC | 1201 | GTTAGATCACATCACCAATA |
| 248 | 703 | TTATTGGTGATGTGATCTAA | 1202 | TTAGATCACATCACCAATAA |
| 249 | 704 | GTTATTGGTGATGTGATCTA | 1203 | TAGATCACATCACCAATAAC |
| 250 | 705 | GGTTATTGGTGATGTGATCT | 1204 | AGATCACATCACCAATAACC |
| 251 | 706 | TGGTTATTGGTGATGTGATC | 1205 | GATCACATCACCAATAACCA |
| 252 | 707 | CTGGTTATTGGTGATGTGAT | 1206 | ATCACATCACCAATAACCAG |
| 253 | 708 | CCTGGTTATTGGTGATGTGA | 1207 | TCACATCACCAATAACCAGG |
| 254 | 709 | TCCTGGTTATTGGTGATGTG | 1208 | CACATCACCAATAACCAGGA |
| 255 | 710 | ATCCTGGTTATTGGTGATGT | 1209 | ACATCACCAATAACCAGGAT |
| 256 | 711 | AATCCTGGTTATTGGTGATG | 1210 | CATCACCAATAACCAGGATT |
| 257 | 712 | AAATCCTGGTTATTGGTGAT | 1211 | ATCACCAATAACCAGGATTT |
| 258 | 713 | AAAATCCTGGTTATTGGTGA | 1212 | TCACCAATAACCAGGATTTT |
| 259 | 714 | TAAAATCCTGGTTATTGGTG | 1213 | CACCAATAACCAGGATTTTA |
| 260 | 715 | TTAAAATCCTGGTTATTGGT | 1214 | ACCAATAACCAGGATTTTAA |
| 261 | 716 | TTTAAAATCCTGGTTATTGG | 1215 | CCAATAACCAGGATTTTAAA |
| 262 | 717 | CTTTAAAATCCTGGTTATTG | 1216 | CAATAACCAGGATTTTAAAG |
| 263 | 718 | CCTTTAAAATCCTGGTTATT | 1217 | AATAACCAGGATTTTAAAGG |
| 264 | 719 | CCCTTTAAAATCCTGGTTAT | 1218 | ATAACCAGGATTTTAAAGGG |
| 265 | 720 | ACCCTTTAAAATCCTGGTTA | 1219 | TAACCAGGATTTTAAAGGGT |
| 266 | 721 | GACCCTTTAAAATCCTGGTT | 1220 | AACCAGGATTTTAAAGGGTC |
| 267 | 722 | AGACCCTTTAAAATCCTGGT | 1221 | ACCAGGATTTTAAAGGGTCT |
| 268 | 723 | CAGACCCTTTAAAATCCTGG | 1222 | CCAGGATTTTAAAGGGTCTG |
| 269 | 724 | GCAGACCCTTTAAAATCCTG | 1223 | CAGGATTTTAAAGGGTCTGC |
| 270 | 725 | TGCAGACCCTTTAAAATCCT | 1224 | AGGATTTTAAAGGGTCTGCA |
| 271 | 726 | CTGCAGACCCTTTAAAATCC | 1225 | GGATTTTAAAGGGTCTGCAG |
| 272 | 727 | CCTGCAGACCCTTTAAAATC | 1226 | GATTTTAAAGGGTCTGCAGG |
| 273 | 728 | TCCTGCAGACCCTTTAAAAT | 1227 | ATTTTAAAGGGTCTGCAGGA |
| 274 | 729 | CTCCTGCAGACCCTTTAAAA | 1228 | TTTTAAAGGGTCTGCAGGAG |
| 275 | 730 | GCTCCTGCAGACCCTTTAAA | 1229 | TTTAAAGGGTCTGCAGGAGC |
| 276 | 731 | TGCTCCTGCAGACCCTTTAA | 1230 | TTAAAGGGTCTGCAGGAGCA |
| 277 | 732 | GTGCTCCTGCAGACCCTTTA | 1231 | TAAAGGGTCTGCAGGAGCAC |
| 278 | 733 | GGTGCTCCTGCAGACCCTTT | 1232 | AAAGGGTCTGCAGGAGCACC |
| 279 | 734 | AGGTGCTCCTGCAGACCCTT | 1233 | AAGGGTCTGCAGGAGCACCT |
| 280 | 735 | AAGGTGCTCCTGCAGACCCT | 1234 | AGGGTCTGCAGGAGCACCTT |
| 281 | 736 | GAAGGTGCTCCTGCAGACCC | 1235 | GGGTCTGCAGGAGCACCTTC |
| 282 | 737 | AGAAGGTGCTCCTGCAGACC | 1236 | GGTCTGCAGGAGCACCTTCT |
| 283 | 738 | CAGAAGGTGCTCCTGCAGAC | 1237 | GTCTGCAGGAGCACCTTCTG |
| 284 | 739 | ACAGAAGGTGCTCCTGCAGA | 1238 | TCTGCAGGAGCACCTTCTGT |
| 285 | 740 | CACAGAAGGTGCTCCTGCAG | 1239 | CTGCAGGAGCACCTTCTGTG |
| 286 | 741 | CCACAGAAGGTGCTCCTGCA | 1240 | TGCAGGAGCACCTTCTGTGG |
| 287 | 742 | TCCACAGAAGGTGCTCCTGC | 1241 | GCAGGAGCACCTTCTGTGGA |
| 288 | 743 | TTCCACAGAAGGTGCTCCTG | 1242 | CAGGAGCACCTTCTGTGGAA |
| 289 | 744 | TTTCCACAGAAGGTGCTCCT | 1243 | AGGAGCACCTTCTGTGGAAA |
| 290 | 745 | TTTTCCACAGAAGGTGCTCC | 1244 | GGAGCACCTTCTGTGGAAAA |
| 291 | 746 | ATTTTCCACAGAAGGTGCTC | 1245 | GAGCACCTTCTGTGGAAAAT |
| 292 | 747 | CATTTTCCACAGAAGGTGCT | 1246 | AGCACCTTCTGTGGAAAATG |
| 293 | 748 | ACATTTTCCACAGAAGGTGC | 1247 | GCACCTTCTGTGGAAAATGT |
| 294 | 749 | TACATTTTCCACAGAAGGTG | 1248 | CACCTTCTGTGGAAAATGTA |
| 295 | 750 | TTACATTTTCCACAGAAGGT | 1249 | ACCTTCTGTGGAAAATGTAA |
| 296 | 751 | TTTACATTTTCCACAGAAGG | 1250 | CCTTCTGTGGAAAATGTAAA |
| 297 | 752 | CTTTACATTTTCCACAGAAG | 1251 | CTTCTGTGGAAAATGTAAAG |
| 298 | 753 | TCTTTACATTTTCCACAGAA | 1252 | TTCTGTGGAAAATGTAAAGA |
| 299 | 754 | TTCTTTACATTTTCCACAGA | 1253 | TCTGTGGAAAATGTAAAGAA |
| 300 | 755 | ATTCTTTACATTTTCCACAG | 1254 | CTGTGGAAAATGTAAAGAAT |
| 301 | 756 | CATTCTTTACATTTTCCACA | 1255 | TGTGGAAAATGTAAAGAATG |
| 302 | 757 | CCATTCTTTACATTTTCCAC | 1256 | GTGGAAAATGTAAAGAATGG |
| 303 | 758 | TCCATTCTTTACATTTTCCA | 1257 | TGGAAAATGTAAAGAATGGA |
| 304 | 759 | TTCCATTCTTTACATTTTCC | 1258 | GGAAAATGTAAAGAATGGAA |
| 305 | 760 | ATTCCATTCTTTACATTTTC | 1259 | GAAAATGTAAAGAATGGAAT |
| 306 | 761 | GATTCCATTCTTTACATTTT | 1260 | AAAATGTAAAGAATGGAATC |
| 307 | 762 | TGATTCCATTCTTTACATTT | 1261 | AAATGTAAAGAATGGAATCA |
| 308 | 763 | CTGATTCCATTCTTTACATT | 1262 | AATGTAAAGAATGGAATCAG |
| 309 | 764 | TCTGATTCCATTCTTTACAT | 1263 | ATGTAAAGAATGGAATCAGA |
| 310 | 765 | TTCTGATTCCATTCTTTACA | 1264 | TGTAAAGAATGGAATCAGAA |
| 311 | 766 | GTTCTGATTCCATTCTTTAC | 1265 | GTAAAGAATGGAATCAGAAC |
| 312 | 767 | TGTTCTGATTCCATTCTTTA | 1266 | TAAAGAATGGAATCAGAACA |
| 313 | 768 | CTGTTCTGATTCCATTCTTT | 1267 | AAAGAATGGAATCAGAACAG |
| 314 | 769 | CCTGTTCTGATTCCATTCTT | 1268 | AAGAATGGAATCAGAACAGG |
| 315 | 770 | ACCTGTTCTGATTCCATTCT | 1269 | AGAATGGAATCAGAACAGGT |
| 316 | 771 | AACCTGTTCTGATTCCATTC | 1270 | GAATGGAATCAGAACAGGTT |
| 317 | 772 | AAACCTGTTCTGATTCCATT | 1271 | AATGGAATCAGAACAGGTTT |
| 318 | 773 | AAAACCTGTTCTGATTCCAT | 1272 | ATGGAATCAGAACAGGTTTT |
| 319 | 774 | GAAAACCTGTTCTGATTCCA | 1273 | TGGAATCAGAACAGGTTTTC |
| 320 | 775 | AGAAAACCTGTTCTGATTCC | 1274 | GGAATCAGAACAGGTTTTCT |
| 321 | 776 | CAGAAAACCTGTTCTGATTC | 1275 | GAATCAGAACAGGTTTTCTG |
| 322 | 777 | CCAGAAAACCTGTTCTGATT | 1276 | AATCAGAACAGGTTTTCTGG |
| 323 | 778 | TCCAGAAAACCTGTTCTGAT | 1277 | ATCAGAACAGGTTTTCTGGA |
| 324 | 779 | CTCCAGAAAACCTGTTCTGA | 1278 | TCAGAACAGGTTTTCTGGAG |
| 325 | 780 | TCTCCAGAAAACCTGTTCTG | 1279 | CAGAACAGGTTTTCTGGAGA |
| 326 | 781 | ATCTCCAGAAAACCTGTTCT | 1280 | AGAACAGGTTTTCTGGAGAT |
| 327 | 782 | AATCTCCAGAAAACCTGTTC | 1281 | GAACAGGTTTTCTGGAGATT |
| 328 | 783 | CAATCTCCAGAAAACCTGTT | 1282 | AACAGGTTTTCTGGAGATTG |
| 329 | 784 | TCAATCTCCAGAAAACCTGT | 1283 | ACAGGTTTTCTGGAGATTGA |
| 330 | 785 | ATCAATCTCCAGAAAACCTG | 1284 | CAGGTTTTCTGGAGATTGAT |
| 331 | 786 | CATCAATCTCCAGAAAACCT | 1285 | AGGTTTTCTGGAGATTGATG |
| 332 | 787 | TCATCAATCTCCAGAAAACC | 1286 | GGTTTTCTGGAGATTGATGA |
| 333 | 788 | TTCATCAATCTCCAGAAAAC | 1287 | GTTTTCTGGAGATTGATGAA |
| 334 | 789 | GTTCATCAATCTCCAGAAAA | 1288 | TTTTCTGGAGATTGATGAAC |
| 335 | 790 | TGTTCATCAATCTCCAGAAA | 1289 | TTTCTGGAGATTGATGAACA |
| 336 | 791 | GTGTTCATCAATCTCCAGAA | 1290 | TTCTGGAGATTGATGAACAC |
| 337 | 792 | TGTGTTCATCAATCTCCAGA | 1291 | TCTGGAGATTGATGAACACA |
| 338 | 793 | ATGTGTTCATCAATCTCCAG | 1292 | CTGGAGATTGATGAACACAT |
| 339 | 794 | CATGTGTTCATCAATCTCCA | 1293 | TGGAGATTGATGAACACATG |
| 340 | 795 | TCATGTGTTCATCAATCTCC | 1294 | GGAGATTGATGAACACATGA |
| 341 | 796 | CTCATGTGTTCATCAATCTC | 1295 | GAGATTGATGAACACATGAG |
| 342 | 797 | TCTCATGTGTTCATCAATCT | 1296 | AGATTGATGAACACATGAGA |
| 343 | 798 | CTCTCATGTGTTCATCAATC | 1297 | GATTGATGAACACATGAGAG |
| 344 | 799 | ACTCTCATGTGTTCATCAAT | 1298 | ATTGATGAACACATGAGAGT |
| 345 | 800 | AACTCTCATGTGTTCATCAA | 1299 | TTGATGAACACATGAGAGTT |
| 346 | 801 | TAACTCTCATGTGTTCATCA | 1300 | TGATGAACACATGAGAGTTA |
| 347 | 802 | ATAACTCTCATGTGTTCATC | 1301 | GATGAACACATGAGAGTTAT |
| 348 | 803 | CATAACTCTCATGTGTTCAT | 1302 | ATGAACACATGAGAGTTATG |
| 349 | 804 | ACATAACTCTCATGTGTTCA | 1303 | TGAACACATGAGAGTTATGT |
| 350 | 805 | GACATAACTCTCATGTGTTC | 1304 | GAACACATGAGAGTTATGTC |
| 351 | 806 | TGACATAACTCTCATGTGTT | 1305 | AACACATGAGAGTTATGTCA |
| 352 | 807 | CTGACATAACTCTCATGTGT | 1306 | ACACATGAGAGTTATGTCAG |
| 353 | 808 | TCTGACATAACTCTCATGTG | 1307 | CACATGAGAGTTATGTCAGA |
| 354 | 809 | CTCTGACATAACTCTCATGT | 1308 | ACATGAGAGTTATGTCAGAG |
| 355 | 810 | TCTCTGACATAACTCTCATG | 1309 | CATGAGAGTTATGTCAGAGA |
| 356 | 811 | TTCTCTGACATAACTCTCAT | 1310 | ATGAGAGTTATGTCAGAGAA |
| 357 | 812 | CTTCTCTGACATAACTCTCA | 1311 | TGAGAGTTATGTCAGAGAAG |
| 358 | 813 | TCTTCTCTGACATAACTCTC | 1312 | GAGAGTTATGTCAGAGAAGA |
| 359 | 814 | TTCTTCTCTGACATAACTCT | 1313 | AGAGTTATGTCAGAGAAGAA |
| 360 | 815 | TTTCTTCTCTGACATAACTC | 1314 | GAGTTATGTCAGAGAAGAAA |
| 361 | 816 | GTTTCTTCTCTGACATAACT | 1315 | AGTTATGTCAGAGAAGAAAC |
| 362 | 817 | TGTTTCTTCTCTGACATAAC | 1316 | GTTATGTCAGAGAAGAAACA |
| 363 | 818 | ATGTTTCTTCTCTGACATAA | 1317 | TTATGTCAGAGAAGAAACAT |
| 364 | 819 | CATGTTTCTTCTCTGACATA | 1318 | TATGTCAGAGAAGAAACATG |
| 365 | 820 | CCATGTTTCTTCTCTGACAT | 1319 | ATGTCAGAGAAGAAACATGG |
| 366 | 821 | ACCATGTTTCTTCTCTGACA | 1320 | TGTCAGAGAAGAAACATGGT |
| 367 | 822 | CACCATGTTTCTTCTCTGAC | 1321 | GTCAGAGAAGAAACATGGTG |
| 368 | 823 | GCACCATGTTTCTTCTCTGA | 1322 | TCAGAGAAGAAACATGGTGC |
| 369 | 824 | TGCACCATGTTTCTTCTCTG | 1323 | CAGAGAAGAAACATGGTGCA |
| 370 | 825 | CTGCACCATGTTTCTTCTCT | 1324 | AGAGAAGAAACATGGTGCAG |
| 371 | 826 | TCTGCACCATGTTTCTTCTC | 1325 | GAGAAGAAACATGGTGCAGA |
| 372 | 827 | ATCTGCACCATGTTTCTTCT | 1326 | AGAAGAAACATGGTGCAGAT |
| 373 | 828 | TATCTGCACCATGTTTCTTC | 1327 | GAAGAAACATGGTGCAGATA |
| 374 | 829 | CTATCTGCACCATGTTTCTT | 1328 | AAGAAACATGGTGCAGATAG |
| 375 | 830 | TCTATCTGCACCATGTTTCT | 1329 | AGAAACATGGTGCAGATAGA |
| 376 | 831 | TTCTATCTGCACCATGTTTC | 1330 | GAAACATGGTGCAGATAGAA |
| 377 | 832 | CTTCTATCTGCACCATGTTT | 1331 | AAACATGGTGCAGATAGAAG |
| 378 | 833 | ACTTCTATCTGCACCATGTT | 1332 | AACATGGTGCAGATAGAAGT |
| 379 | 834 | CACTTCTATCTGCACCATGT | 1333 | ACATGGTGCAGATAGAAGTG |
| 380 | 835 | CCACTTCTATCTGCACCATG | 1334 | CATGGTGCAGATAGAAGTGG |
| 381 | 836 | CCCACTTCTATCTGCACCAT | 1335 | ATGGTGCAGATAGAAGTGGG |
| 382 | 837 | ACCCACTTCTATCTGCACCA | 1336 | TGGTGCAGATAGAAGTGGGT |
| 383 | 838 | GACCCACTTCTATCTGCACC | 1337 | GGTGCAGATAGAAGTGGGTC |
| 384 | 839 | TGACCCACTTCTATCTGCAC | 1338 | GTGCAGATAGAAGTGGGTCA |
| 385 | 840 | TTGACCCACTTCTATCTGCA | 1339 | TGCAGATAGAAGTGGGTCAA |
| 386 | 841 | GTTGACCCACTTCTATCTGC | 1340 | GCAGATAGAAGTGGGTCAAC |
| 387 | 842 | TGTTGACCCACTTCTATCTG | 1341 | CAGATAGAAGTGGGTCAACA |
| 388 | 843 | CTGTTGACCCACTTCTATCT | 1342 | AGATAGAAGTGGGTCAACAG |
| 389 | 844 | GCTGTTGACCCACTTCTATC | 1343 | GATAGAAGTGGGTCAACAGC |
| 390 | 845 | AGCTGTTGACCCACTTCTAT | 1344 | ATAGAAGTGGGTCAACAGCT |
| 391 | 846 | CAGCTGTTGACCCACTTCTA | 1345 | TAGAAGTGGGTCAACAGCTG |
| 392 | 847 | ACAGCTGTTGACCCACTTCT | 1346 | AGAAGTGGGTCAACAGCTGT |
| 393 | 848 | TACAGCTGTTGACCCACTTC | 1347 | GAAGTGGGTCAACAGCTGTA |
| 394 | 849 | CTACAGCTGTTGACCCACTT | 1348 | AAGTGGGTCAACAGCTGTAG |
| 395 | 850 | CCTACAGCTGTTGACCCACT | 1349 | AGTGGGTCAACAGCTGTAGG |
| 396 | 851 | ACCTACAGCTGTTGACCCAC | 1350 | GTGGGTCAACAGCTGTAGGT |
| 397 | 852 | CACCTACAGCTGTTGACCCA | 1351 | TGGGTCAACAGCTGTAGGTG |
| 398 | 853 | ACACCTACAGCTGTTGACCC | 1352 | GGGTCAACAGCTGTAGGTGT |
| 399 | 854 | GACACCTACAGCTGTTGACC | 1353 | GGTCAACAGCTGTAGGTGTC |
| 400 | 855 | AGACACCTACAGCTGTTGAC | 1354 | GTCAACAGCTGTAGGTGTCT |
| 401 | 856 | AAGACACCTACAGCTGTTGA | 1355 | TCAACAGCTGTAGGTGTCTT |
| 402 | 857 | TAAGACACCTACAGCTGTTG | 1356 | CAACAGCTGTAGGTGTCTTA |
| 403 | 858 | TTAAGACACCTACAGCTGTT | 1357 | AACAGCTGTAGGTGTCTTAA |
| 404 | 859 | ATTAAGACACCTACAGCTGT | 1358 | ACAGCTGTAGGTGTCTTAAT |
| 405 | 860 | AATTAAGACACCTACAGCTG | 1359 | CAGCTGTAGGTGTCTTAATT |
| 406 | 861 | AAATTAAGACACCTACAGCT | 1360 | AGCTGTAGGTGTCTTAATTT |
| 407 | 862 | GAAATTAAGACACCTACAGC | 1361 | GCTGTAGGTGTCTTAATTTC |
| 408 | 863 | AGAAATTAAGACACCTACAG | 1362 | CTGTAGGTGTCTTAATTTCT |
| 409 | 864 | GAGAAATTAAGACACCTACA | 1363 | TGTAGGTGTCTTAATTTCTC |
| 410 | 865 | GGAGAAATTAAGACACCTAC | 1364 | GTAGGTGTCTTAATTTCTCC |
| 411 | 866 | GGGAGAAATTAAGACACCTA | 1365 | TAGGTGTCTTAATTTCTCCC |
| 412 | 867 | GGGGAGAAATTAAGACACCT | 1366 | AGGTGTCTTAATTTCTCCCC |
| 413 | 868 | TGGGGAGAAATTAAGACACC | 1367 | GGTGTCTTAATTTCTCCCCA |
| 414 | 869 | TTGGGGAGAAATTAAGACAC | 1368 | GTGTCTTAATTTCTCCCCAA |
| 415 | 870 | GTTGGGGAGAAATTAAGACA | 1369 | TGTCTTAATTTCTCCCCAAC |
| 416 | 871 | TGTTGGGGAGAAATTAAGAC | 1370 | GTCTTAATTTCTCCCCAACA |
| 417 | 872 | ATGTTGGGGAGAAATTAAGA | 1371 | TCTTAATTTCTCCCCAACAT |
| 418 | 873 | TATGTTGGGGAGAAATTAAG | 1372 | CTTAATTTCTCCCCAACATA |
| 419 | 874 | GTATGTTGGGGAGAAATTAA | 1373 | TTAATTTCTCCCCAACATAC |
| 420 | 875 | AGTATGTTGGGGAGAAATTA | 1374 | TAATTTCTCCCCAACATACT |
| 421 | 876 | AAGTATGTTGGGGAGAAATT | 1375 | AATTTCTCCCCAACATACTT |
| 422 | 877 | TAAGTATGTTGGGGAGAAAT | 1376 | ATTTCTCCCCAACATACTTA |
| 423 | 878 | ATAAGTATGTTGGGGAGAAA | 1377 | TTTCTCCCCAACATACTTAT |
| 424 | 879 | AATAAGTATGTTGGGGAGAA | 1378 | TTCTCCCCAACATACTTATT |
| 425 | 880 | AAATAAGTATGTTGGGGAGA | 1379 | TCTCCCCAACATACTTATTT |
| 426 | 881 | GAAATAAGTATGTTGGGGAG | 1380 | CTCCCCAACATACTTATTTC |
| 427 | 882 | TGAAATAAGTATGTTGGGGA | 1381 | TCCCCAACATACTTATTTCA |
| 428 | 883 | ATGAAATAAGTATGTTGGGG | 1382 | CCCCAACATACTTATTTCAT |
| 429 | 884 | AATGAAATAAGTATGTTGGG | 1383 | CCCAACATACTTATTTCATT |
| 430 | 885 | TAATGAAATAAGTATGTTGG | 1384 | CCAACATACTTATTTCATTA |
| 431 | 886 | TTAATGAAATAAGTATGTTG | 1385 | CAACATACTTATTTCATTAA |
| 432 | 887 | GTTAATGAAATAAGTATGTT | 1386 | AACATACTTATTTCATTAAC |
| 433 | 888 | AGTTAATGAAATAAGTATGT | 1387 | ACATACTTATTTCATTAACT |
| 434 | 889 | CAGTTAATGAAATAAGTATG | 1388 | CATACTTATTTCATTAACTG |
| 435 | 890 | ACAGTTAATGAAATAAGTAT | 1389 | ATACTTATTTCATTAACTGT |
| 436 | 891 | CACAGTTAATGAAATAAGTA | 1390 | TACTTATTTCATTAACTGTG |
| 437 | 892 | CCACAGTTAATGAAATAAGT | 1391 | ACTTATTTCATTAACTGTGG |
| 438 | 893 | TCCACAGTTAATGAAATAAG | 1392 | CTTATTTCATTAACTGTGGA |
| 439 | 894 | CTCCACAGTTAATGAAATAA | 1393 | TTATTTCATTAACTGTGGAG |
| 440 | 895 | TCTCCACAGTTAATGAAATA | 1394 | TATTTCATTAACTGTGGAGA |
| 441 | 896 | GTCTCCACAGTTAATGAAAT | 1395 | ATTTCATTAACTGTGGAGAC |
| 442 | 897 | AGTCTCCACAGTTAATGAAA | 1396 | TTTCATTAACTGTGGAGACT |
| 443 | 898 | GAGTCTCCACAGTTAATGAA | 1397 | TTCATTAACTGTGGAGACTC |
| 444 | 899 | TGAGTCTCCACAGTTAATGA | 1398 | TCATTAACTGTGGAGACTCA |
| 445 | 900 | TTGAGTCTCCACAGTTAATG | 1399 | CATTAACTGTGGAGACTCAA |
| 446 | 901 | CTTGAGTCTCCACAGTTAAT | 1400 | ATTAACTGTGGAGACTCAAG |
| 447 | 902 | TCTTGAGTCTCCACAGTTAA | 1401 | TTAACTGTGGAGACTCAAGA |
| 448 | 903 | CTCTTGAGTCTCCACAGTTA | 1402 | TAACTGTGGAGACTCAAGAG |
| 449 | 904 | CCTCTTGAGTCTCCACAGTT | 1403 | AACTGTGGAGACTCAAGAGG |
| 450 | 905 | ACCTCTTGAGTCTCCACAGT | 1404 | ACTGTGGAGACTCAAGAGGT |
| 451 | 906 | AACCTCTTGAGTCTCCACAG | 1405 | CTGTGGAGACTCAAGAGGTT |
| 452 | 907 | AAACCTCTTGAGTCTCCACA | 1406 | TGTGGAGACTCAAGAGGTTT |
| 453 | 908 | TAAACCTCTTGAGTCTCCAC | 1407 | GTGGAGACTCAAGAGGTTTA |
| 454 | 909 | GTAAACCTCTTGAGTCTCCA | 1408 | TGGAGACTCAAGAGGTTTAC |
| 455 | 910 | AGTAAACCTCTTGAGTCTCC | 1409 | GGAGACTCAAGAGGTTTACT |
| 456 | 911 | AAGTAAACCTCTTGAGTCTC | 1410 | GAGACTCAAGAGGTTTACTT |
| 457 | 912 | AAAGTAAACCTCTTGAGTCT | 1411 | AGACTCAAGAGGTTTACTTT |
| 458 | 913 | CAAAGTAAACCTCTTGAGTC | 1412 | GACTCAAGAGGTTTACTTTG |
| 459 | 914 | ACAAAGTAAACCTCTTGAGT | 1413 | ACTCAAGAGGTTTACTTTGT |
| 460 | 915 | TACAAAGTAAACCTCTTGAG | 1414 | CTCAAGAGGTTTACTTTGTA |
| 461 | 916 | CTACAAAGTAAACCTCTTGA | 1415 | TCAAGAGGTTTACTTTGTAG |
| 462 | 917 | CCTACAAAGTAAACCTCTTG | 1416 | CAAGAGGTTTACTTTGTAGG |
| 463 | 918 | TCCTACAAAGTAAACCTCTT | 1417 | AAGAGGTTTACTTTGTAGGA |
| 464 | 919 | TTCCTACAAAGTAAACCTCT | 1418 | AGAGGTTTACTTTGTAGGAA |
| 465 | 920 | GTTCCTACAAAGTAAACCTC | 1419 | GAGGTTTACTTTGTAGGAAC |
| 466 | 921 | TGTTCCTACAAAGTAAACCT | 1420 | AGGTTTACTTTGTAGGAACA |
| 467 | 922 | CTGTTCCTACAAAGTAAACC | 1421 | GGTTTACTTTGTAGGAACAG |
| 468 | 923 | CCTGTTCCTACAAAGTAAAC | 1422 | GTTTACTTTGTAGGAACAGG |
| 469 | 924 | TCCTGTTCCTACAAAGTAAA | 1423 | TTTACTTTGTAGGAACAGGA |
| 470 | 925 | TTCCTGTTCCTACAAAGTAA | 1424 | TTACTTTGTAGGAACAGGAA |
| 471 | 926 | TTTCCTGTTCCTACAAAGTA | 1425 | TACTTTGTAGGAACAGGAAA |
| 472 | 927 | CTTTCCTGTTCCTACAAAGT | 1426 | ACTTTGTAGGAACAGGAAAG |
| 473 | 928 | ACTTTCCTGTTCCTACAAAG | 1427 | CTTTGTAGGAACAGGAAAGT |
| 474 | 929 | AACTTTCCTGTTCCTACAAA | 1428 | TTTGTAGGAACAGGAAAGTT |
| 475 | 930 | GAACTTTCCTGTTCCTACAA | 1429 | TTGTAGGAACAGGAAAGTTC |
| 476 | 931 | TGAACTTTCCTGTTCCTACA | 1430 | TGTAGGAACAGGAAAGTTCA |
| 477 | 932 | ATGAACTTTCCTGTTCCTAC | 1431 | GTAGGAACAGGAAAGTTCAT |
| 478 | 933 | AATGAACTTTCCTGTTCCTA | 1432 | TAGGAACAGGAAAGTTCATT |
| 479 | 934 | AAATGAACTTTCCTGTTCCT | 1433 | AGGAACAGGAAAGTTCATTT |
| 480 | 935 | GAAATGAACTTTCCTGTTCC | 1434 | GGAACAGGAAAGTTCATTTC |
| 481 | 936 | AGAAATGAACTTTCCTGTTC | 1435 | GAACAGGAAAGTTCATTTCT |
| 482 | 937 | AAGAAATGAACTTTCCTGTT | 1436 | AACAGGAAAGTTCATTTCTT |
| 483 | 938 | GAAGAAATGAACTTTCCTGT | 1437 | ACAGGAAAGTTCATTTCTTC |
| 484 | 939 | TGAAGAAATGAACTTTCCTG | 1438 | CAGGAAAGTTCATTTCTTCA |
| 485 | 940 | GTGAAGAAATGAACTTTCCT | 1439 | AGGAAAGTTCATTTCTTCAC |
| 486 | 941 | TGTGAAGAAATGAACTTTCC | 1440 | GGAAAGTTCATTTCTTCACA |
| 487 | 942 | GTGTGAAGAAATGAACTTTC | 1441 | GAAAGTTCATTTCTTCACAC |
| 488 | 943 | TGTGTGAAGAAATGAACTTT | 1442 | AAAGTTCATTTCTTCACACA |
| 489 | 944 | TTGTGTGAAGAAATGAACTT | 1443 | AAGTTCATTTCTTCACACAA |
| 490 | 945 | CTTGTGTGAAGAAATGAACT | 1444 | AGTTCATTTCTTCACACAAG |
| 491 | 946 | TCTTGTGTGAAGAAATGAAC | 1445 | GTTCATTTCTTCACACAAGA |
| 492 | 947 | ATCTTGTGTGAAGAAATGAA | 1446 | TTCATTTCTTCACACAAGAT |
| 493 | 948 | GATCTTGTGTGAAGAAATGA | 1447 | TCATTTCTTCACACAAGATC |
| 494 | 949 | TGATCTTGTGTGAAGAAATG | 1448 | CATTTCTTCACACAAGATCA |
| 495 | 950 | GTGATCTTGTGTGAAGAAAT | 1449 | ATTTCTTCACACAAGATCAC |
| 496 | 951 | TGTGATCTTGTGTGAAGAAA | 1450 | TTTCTTCACACAAGATCACA |
| 497 | 952 | TTGTGATCTTGTGTGAAGAA | 1451 | TTCTTCACACAAGATCACAA |
| 498 | 953 | TTTGTGATCTTGTGTGAAGA | 1452 | TCTTCACACAAGATCACAAA |
| 499 | 954 | GTTTGTGATCTTGTGTGAAG | 1453 | CTTCACACAAGATCACAAAC |
| 500 | 955 | GGTTTGTGATCTTGTGTGAA | 1454 | TTCACACAAGATCACAAACC |
| 501 | 956 | TGGTTTGTGATCTTGTGTGA | 1455 | TCACACAAGATCACAAACCA |
| 502 | 957 | TTGGTTTGTGATCTTGTGTG | 1456 | CACACAAGATCACAAACCAA |
| 503 | 958 | CTTGGTTTGTGATCTTGTGT | 1457 | ACACAAGATCACAAACCAAG |
| 504 | 959 | ACTTGGTTTGTGATCTTGTG | 1458 | CACAAGATCACAAACCAAGT |
| 505 | 960 | TACTTGGTTTGTGATCTTGT | 1459 | ACAAGATCACAAACCAAGTA |
| 506 | 961 | TTACTTGGTTTGTGATCTTG | 1460 | CAAGATCACAAACCAAGTAA |
| 507 | 962 | ATTACTTGGTTTGTGATCTT | 1461 | AAGATCACAAACCAAGTAAT |
| 508 | 963 | GATTACTTGGTTTGTGATCT | 1462 | AGATCACAAACCAAGTAATC |
| 509 | 964 | GGATTACTTGGTTTGTGATC | 1463 | GATCACAAACCAAGTAATCC |
| 510 | 965 | CGGATTACTTGGTTTGTGAT | 1464 | ATCACAAACCAAGTAATCCG |
| 511 | 966 | GCGGATTACTTGGTTTGTGA | 1465 | TCACAAACCAAGTAATCCGC |
| 512 | 967 | AGCGGATTACTTGGTTTGTG | 1466 | CACAAACCAAGTAATCCGCT |
| 513 | 968 | CAGCGGATTACTTGGTTTGT | 1467 | ACAAACCAAGTAATCCGCTG |
| 514 | 969 | CCAGCGGATTACTTGGTTTG | 1468 | CAAACCAAGTAATCCGCTGG |
| 515 | 970 | TCCAGCGGATTACTTGGTTT | 1469 | AAACCAAGTAATCCGCTGGA |
| 516 | 971 | CTCCAGCGGATTACTTGGTT | 1470 | AACCAAGTAATCCGCTGGAG |
| 517 | 972 | TCTCCAGCGGATTACTTGGT | 1471 | ACCAAGTAATCCGCTGGAGA |
| 518 | 973 | TTCTCCAGCGGATTACTTGG | 1472 | CCAAGTAATCCGCTGGAGAA |
| 519 | 974 | TTTCTCCAGCGGATTACTTG | 1473 | CAAGTAATCCGCTGGAGAAA |
| 520 | 975 | CTTTCTCCAGCGGATTACTT | 1474 | AAGTAATCCGCTGGAGAAAG |
| 521 | 976 | TCTTTCTCCAGCGGATTACT | 1475 | AGTAATCCGCTGGAGAAAGA |
| 522 | 977 | TTCTTTCTCCAGCGGATTAC | 1476 | GTAATCCGCTGGAGAAAGAA |
| 523 | 978 | GTTCTTTCTCCAGCGGATTA | 1477 | TAATCCGCTGGAGAAAGAAC |
| 524 | 979 | CGTTCTTTCTCCAGCGGATT | 1478 | AATCCGCTGGAGAAAGAACG |
| 525 | 980 | TCGTTCTTTCTCCAGCGGAT | 1479 | ATCCGCTGGAGAAAGAACGA |
| 526 | 981 | TTCGTTCTTTCTCCAGCGGA | 1480 | TCCGCTGGAGAAAGAACGAA |
| 527 | 982 | ATTCGTTCTTTCTCCAGCGG | 1481 | CCGCTGGAGAAAGAACGAAT |
| 528 | 983 | AATTCGTTCTTTCTCCAGCG | 1482 | CGCTGGAGAAAGAACGAATT |
| 529 | 984 | GAATTCGTTCTTTCTCCAGC | 1483 | GCTGGAGAAAGAACGAATTC |
| 530 | 985 | TGAATTCGTTCTTTCTCCAG | 1484 | CTGGAGAAAGAACGAATTCA |
| 531 | 986 | CTGAATTCGTTCTTTCTCCA | 1485 | TGGAGAAAGAACGAATTCAG |
| 532 | 987 | TCTGAATTCGTTCTTTCTCC | 1486 | GGAGAAAGAACGAATTCAGA |
| 533 | 988 | TTCTGAATTCGTTCTTTCTC | 1487 | GAGAAAGAACGAATTCAGAA |
| 534 | 989 | ATTCTGAATTCGTTCTTTCT | 1488 | AGAAAGAACGAATTCAGAAT |
| 535 | 990 | CATTCTGAATTCGTTCTTTC | 1489 | GAAAGAACGAATTCAGAATG |
| 536 | 991 | GCATTCTGAATTCGTTCTTT | 1490 | AAAGAACGAATTCAGAATGC |
| 537 | 992 | TGCATTCTGAATTCGTTCTT | 1491 | AAGAACGAATTCAGAATGCA |
| 538 | 993 | CTGCATTCTGAATTCGTTCT | 1492 | AGAACGAATTCAGAATGCAG |
| 539 | 994 | CCTGCATTCTGAATTCGTTC | 1493 | GAACGAATTCAGAATGCAGG |
| 540 | 995 | ACCTGCATTCTGAATTCGTT | 1494 | AACGAATTCAGAATGCAGGT |
| 541 | 996 | CACCTGCATTCTGAATTCGT | 1495 | ACGAATTCAGAATGCAGGTG |
| 542 | 997 | CCACCTGCATTCTGAATTCG | 1496 | CGAATTCAGAATGCAGGTGG |
| 543 | 998 | GCCACCTGCATTCTGAATTC | 1497 | GAATTCAGAATGCAGGTGGC |
| 544 | 999 | AGCCACCTGCATTCTGAATT | 1498 | AATTCAGAATGCAGGTGGCT |
| 545 | 1000 | GAGCCACCTGCATTCTGAAT | 1499 | ATTCAGAATGCAGGTGGCTC |
| 546 | 1001 | AGAGCCACCTGCATTCTGAA | 1500 | TTCAGAATGCAGGTGGCTCT |
| 547 | 1002 | CAGAGCCACCTGCATTCTGA | 1501 | TCAGAATGCAGGTGGCTCTG |
| 548 | 1003 | ACAGAGCCACCTGCATTCTG | 1502 | CAGAATGCAGGTGGCTCTGT |
| 549 | 1004 | TACAGAGCCACCTGCATTCT | 1503 | AGAATGCAGGTGGCTCTGTA |
| 550 | 1005 | TTACAGAGCCACCTGCATTC | 1504 | GAATGCAGGTGGCTCTGTAA |
| 551 | 1006 | ATTACAGAGCCACCTGCATT | 1505 | AATGCAGGTGGCTCTGTAAT |
| 552 | 1007 | CATTACAGAGCCACCTGCAT | 1506 | ATGCAGGTGGCTCTGTAATG |
| 553 | 1008 | TCATTACAGAGCCACCTGCA | 1507 | TGCAGGTGGCTCTGTAATGA |
| 554 | 1009 | ATCATTACAGAGCCACCTGC | 1508 | GCAGGTGGCTCTGTAATGAT |
| 555 | 1010 | AATCATTACAGAGCCACCTG | 1509 | CAGGTGGCTCTGTAATGATT |
| 556 | 1011 | GAATCATTACAGAGCCACCT | 1510 | AGGTGGCTCTGTAATGATTC |
| 557 | 1012 | TGAATCATTACAGAGCCACC | 1511 | GGTGGCTCTGTAATGATTCA |
| 558 | 1013 | CTGAATCATTACAGAGCCAC | 1512 | GTGGCTCTGTAATGATTCAG |
| 559 | 1014 | GCTGAATCATTACAGAGCCA | 1513 | TGGCTCTGTAATGATTCAGC |
| 560 | 1015 | CGCTGAATCATTACAGAGCC | 1514 | GGCTCTGTAATGATTCAGCG |
| 561 | 1016 | ACGCTGAATCATTACAGAGC | 1515 | GCTCTGTAATGATTCAGCGT |
| 562 | 1017 | CACGCTGAATCATTACAGAG | 1516 | CTCTGTAATGATTCAGCGTG |
| 563 | 1018 | ACACGCTGAATCATTACAGA | 1517 | TCTGTAATGATTCAGCGTGT |
| 564 | 1019 | CACACGCTGAATCATTACAG | 1518 | CTGTAATGATTCAGCGTGTG |
| 565 | 1020 | TCACACGCTGAATCATTACA | 1519 | TGTAATGATTCAGCGTGTGA |
| 566 | 1021 | TTCACACGCTGAATCATTAC | 1520 | GTAATGATTCAGCGTGTGAA |
| 567 | 1022 | ATTCACACGCTGAATCATTA | 1521 | TAATGATTCAGCGTGTGAAT |
| 568 | 1023 | CATTCACACGCTGAATCATT | 1522 | AATGATTCAGCGTGTGAATG |
| 569 | 1024 | CCATTCACACGCTGAATCAT | 1523 | ATGATTCAGCGTGTGAATGG |
| 570 | 1025 | GCCATTCACACGCTGAATCA | 1524 | TGATTCAGCGTGTGAATGGC |
| 571 | 1026 | AGCCATTCACACGCTGAATC | 1525 | GATTCAGCGTGTGAATGGCT |
| 572 | 1027 | GAGCCATTCACACGCTGAAT | 1526 | ATTCAGCGTGTGAATGGCTC |
| 573 | 1028 | AGAGCCATTCACACGCTGAA | 1527 | TTCAGCGTGTGAATGGCTCT |
| 574 | 1029 | GAGAGCCATTCACACGCTGA | 1528 | TCAGCGTGTGAATGGCTCTC |
| 575 | 1030 | AGAGAGCCATTCACACGCTG | 1529 | CAGCGTGTGAATGGCTCTCT |
| 576 | 1031 | CAGAGAGCCATTCACACGCT | 1530 | AGCGTGTGAATGGCTCTCTG |
| 577 | 1032 | CCAGAGAGCCATTCACACGC | 1531 | GCGTGTGAATGGCTCTCTGG |
| 578 | 1033 | GCCAGAGAGCCATTCACACG | 1532 | CGTGTGAATGGCTCTCTGGC |
| 579 | 1034 | AGCCAGAGAGCCATTCACAC | 1533 | GTGTGAATGGCTCTCTGGCT |
| 580 | 1035 | CAGCCAGAGAGCCATTCACA | 1534 | TGTGAATGGCTCTCTGGCTG |
| 581 | 1036 | ACAGCCAGAGAGCCATTCAC | 1535 | GTGAATGGCTCTCTGGCTGT |
| 582 | 1037 | TACAGCCAGAGAGCCATTCA | 1536 | TGAATGGCTCTCTGGCTGTA |
| 583 | 1038 | ATACAGCCAGAGAGCCATTC | 1537 | GAATGGCTCTCTGGCTGTAT |
| 584 | 1039 | GATACAGCCAGAGAGCCATT | 1538 | AATGGCTCTCTGGCTGTATC |
| 585 | 1040 | CGATACAGCCAGAGAGCCAT | 1539 | ATGGCTCTCTGGCTGTATCG |
| 586 | 1041 | TCGATACAGCCAGAGAGCCA | 1540 | TGGCTCTCTGGCTGTATCGA |
| 587 | 1042 | CTCGATACAGCCAGAGAGCC | 1541 | GGCTCTCTGGCTGTATCGAG |
| 588 | 1043 | CCTCGATACAGCCAGAGAGC | 1542 | GCTCTCTGGCTGTATCGAGG |
| 589 | 1044 | CCCTCGATACAGCCAGAGAG | 1543 | CTCTCTGGCTGTATCGAGGG |
| 590 | 1045 | GCCCTCGATACAGCCAGAGA | 1544 | TCTCTGGCTGTATCGAGGGC |
| 591 | 1046 | GGCCCTCGATACAGCCAGAG | 1545 | CTCTGGCTGTATCGAGGGCC |
| 592 | 1047 | GGGCCCTCGATACAGCCAGA | 1546 | TCTGGCTGTATCGAGGGCCC |
| 593 | 1048 | AGGGCCCTCGATACAGCCAG | 1547 | CTGGCTGTATCGAGGGCCCT |
| 594 | 1049 | AAGGGCCCTCGATACAGCCA | 1548 | TGGCTGTATCGAGGGCCCTT |
| 595 | 1050 | CAAGGGCCCTCGATACAGCC | 1549 | GGCTGTATCGAGGGCCCTTG |
| 596 | 1051 | CCAAGGGCCCTCGATACAGC | 1550 | GCTGTATCGAGGGCCCTTGG |
| 597 | 1052 | CCCAAGGGCCCTCGATACAG | 1551 | CTGTATCGAGGGCCCTTGGG |
| 598 | 1053 | CCCCAAGGGCCCTCGATACA | 1552 | TGTATCGAGGGCCCTTGGGG |
| 599 | 1054 | TCCCCAAGGGCCCTCGATAC | 1553 | GTATCGAGGGCCCTTGGGGA |
| 600 | 1055 | ATCCCCAAGGGCCCTCGATA | 1554 | TATCGAGGGCCCTTGGGGAT |
| 601 | 1056 | AATCCCCAAGGGCCCTCGAT | 1555 | ATCGAGGGCCCTTGGGGATT |
| 602 | 1057 | AAATCCCCAAGGGCCCTCGA | 1556 | TCGAGGGCCCTTGGGGATTT |
| 603 | 1058 | AAAATCCCCAAGGGCCCTCG | 1557 | CGAGGGCCCTTGGGGATTTT |
| 604 | 1059 | CAAAATCCCCAAGGGCCCTC | 1558 | GAGGGCCCTTGGGGATTTTG |
| 605 | 1060 | TCAAAATCCCCAAGGGCCCT | 1559 | AGGGCCCTTGGGGATTTTGA |
| 606 | 1061 | ATCAAAATCCCCAAGGGCCC | 1560 | GGGCCCTTGGGGATTTTGAT |
| 607 | 1062 | AATCAAAATCCCCAAGGGCC | 1561 | GGCCCTTGGGGATTTTGATT |
| 608 | 1063 | TAATCAAAATCCCCAAGGGC | 1562 | GCCCTTGGGGATTTTGATTA |
| 609 | 1064 | GTAATCAAAATCCCCAAGGG | 1563 | CCCTTGGGGATTTTGATTAC |
| 610 | 1065 | TGTAATCAAAATCCCCAAGG | 1564 | CCTTGGGGATTTTGATTACA |
| 611 | 1066 | TTGTAATCAAAATCCCCAAG | 1565 | CTTGGGGATTTTGATTACAA |
| 612 | 1067 | TTTGTAATCAAAATCCCCAA | 1566 | TTGGGGATTTTGATTACAAA |
| 613 | 1068 | ATTTGTAATCAAAATCCCCA | 1567 | TGGGGATTTTGATTACAAAT |
| 614 | 1069 | CATTTGTAATCAAAATCCCC | 1568 | GGGGATTTTGATTACAAATG |
| 615 | 1070 | ACATTTGTAATCAAAATCCC | 1569 | GGGATTTTGATTACAAATGT |
| 616 | 1071 | CACATTTGTAATCAAAATCC | 1570 | GGATTTTGATTACAAATGTG |
| 617 | 1072 | ACACATTTGTAATCAAAATC | 1571 | GATTTTGATTACAAATGTGT |
| 618 | 1073 | GACACATTTGTAATCAAAAT | 1572 | ATTTTGATTACAAATGTGTC |
| 619 | 1074 | GGACACATTTGTAATCAAAA | 1573 | TTTTGATTACAAATGTGTCC |
| 620 | 1075 | TGGACACATTTGTAATCAAA | 1574 | TTTGATTACAAATGTGTCCA |
| 621 | 1076 | ATGGACACATTTGTAATCAA | 1575 | TTGATTACAAATGTGTCCAT |
| 622 | 1077 | CATGGACACATTTGTAATCA | 1576 | TGATTACAAATGTGTCCATG |
| 623 | 1078 | CCATGGACACATTTGTAATC | 1577 | GATTACAAATGTGTCCATGG |
| 624 | 1079 | TCCATGGACACATTTGTAAT | 1578 | ATTACAAATGTGTCCATGGA |
| 625 | 1080 | TTCCATGGACACATTTGTAA | 1579 | TTACAAATGTGTCCATGGAA |
| 626 | 1081 | TTTCCATGGACACATTTGTA | 1580 | TACAAATGTGTCCATGGAAA |
| 627 | 1082 | TTTTCCATGGACACATTTGT | 1581 | ACAAATGTGTCCATGGAAAA |
| 628 | 1083 | CTTTTCCATGGACACATTTG | 1582 | CAAATGTGTCCATGGAAAAG |
| 629 | 1084 | CCTTTTCCATGGACACATTT | 1583 | AAATGTGTCCATGGAAAAGG |
| 630 | 1085 | ACCTTTTCCATGGACACATT | 1584 | AATGTGTCCATGGAAAAGGT |
| 631 | 1086 | GACCTTTTCCATGGACACAT | 1585 | ATGTGTCCATGGAAAAGGTC |
| 632 | 1087 | GGACCTTTTCCATGGACACA | 1586 | TGTGTCCATGGAAAAGGTCC |
| 633 | 1088 | AGGACCTTTTCCATGGACAC | 1587 | GTGTCCATGGAAAAGGTCCT |
| 634 | 1089 | TAGGACCTTTTCCATGGACA | 1588 | TGTCCATGGAAAAGGTCCTA |
| 635 | 1090 | GTAGGACCTTTTCCATGGAC | 1589 | GTCCATGGAAAAGGTCCTAC |
| 636 | 1091 | AGTAGGACCTTTTCCATGGA | 1590 | TCCATGGAAAAGGTCCTACT |
| 637 | 1092 | CAGTAGGACCTTTTCCATGG | 1591 | CCATGGAAAAGGTCCTACTG |
| 638 | 1093 | TCAGTAGGACCTTTTCCATG | 1592 | CATGGAAAAGGTCCTACTGA |
| 639 | 1094 | CTCAGTAGGACCTTTTCCAT | 1593 | ATGGAAAAGGTCCTACTGAG |
| 640 | 1095 | GCTCAGTAGGACCTTTTCCA | 1594 | TGGAAAAGGTCCTACTGAGC |
| 641 | 1096 | TGCTCAGTAGGACCTTTTCC | 1595 | GGAAAAGGTCCTACTGAGCA |
| 642 | 1097 | CTGCTCAGTAGGACCTTTTC | 1596 | GAAAAGGTCCTACTGAGCAG |
| 643 | 1098 | GCTGCTCAGTAGGACCTTTT | 1597 | AAAAGGTCCTACTGAGCAGC |
| 644 | 1099 | AGCTGCTCAGTAGGACCTTT | 1598 | AAAGGTCCTACTGAGCAGCT |
| 645 | 1100 | AAGCTGCTCAGTAGGACCTT | 1599 | AAGGTCCTACTGAGCAGCTT |
| 646 | 1101 | CAAGCTGCTCAGTAGGACCT | 1600 | AGGTCCTACTGAGCAGCTTG |
| 647 | 1102 | ACAAGCTGCTCAGTAGGACC | 1601 | GGTCCTACTGAGCAGCTTGT |
| 648 | 1103 | GACAAGCTGCTCAGTAGGAC | 1602 | GTCCTACTGAGCAGCTTGTC |
| 649 | 1104 | AGACAAGCTGCTCAGTAGGA | 1603 | TCCTACTGAGCAGCTTGTCT |
| 650 | 1105 | GAGACAAGCTGCTCAGTAGG | 1604 | CCTACTGAGCAGCTTGTCTC |
| 651 | 1106 | TGAGACAAGCTGCTCAGTAG | 1605 | CTACTGAGCAGCTTGTCTCA |
| 652 | 1107 | GTGAGACAAGCTGCTCAGTA | 1606 | TACTGAGCAGCTTGTCTCAC |
| 653 | 1108 | GGTGAGACAAGCTGCTCAGT | 1607 | ACTGAGCAGCTTGTCTCACC |
| 654 | 1109 | TGGTGAGACAAGCTGCTCAG | 1608 | CTGAGCAGCTTGTCTCACCA |
| 655 | 1110 | CTGGTGAGACAAGCTGCTCA | 1609 | TGAGCAGCTTGTCTCACCAG |
| 656 | 1111 | TCTGGTGAGACAAGCTGCTC | 1610 | GAGCAGCTTGTCTCACCAGA |
| 657 | 1112 | CTCTGGTGAGACAAGCTGCT | 1611 | AGCAGCTTGTCTCACCAGAG |
| 658 | 1113 | GCTCTGGTGAGACAAGCTGC | 1612 | GCAGCTTGTCTCACCAGAGC |
| 659 | 1114 | GGCTCTGGTGAGACAAGCTG | 1613 | CAGCTTGTCTCACCAGAGCC |
| 660 | 1115 | AGGCTCTGGTGAGACAAGCT | 1614 | AGCTTGTCTCACCAGAGCCT |
| 661 | 1116 | CAGGCTCTGGTGAGACAAGC | 1615 | GCTTGTCTCACCAGAGCCTG |
| 662 | 1117 | TCAGGCTCTGGTGAGACAAG | 1616 | CTTGTCTCACCAGAGCCTGA |
| 663 | 1118 | TTCAGGCTCTGGTGAGACAA | 1617 | TTGTCTCACCAGAGCCTGAA |
| 664 | 1119 | CTTCAGGCTCTGGTGAGACA | 1618 | TGTCTCACCAGAGCCTGAAG |
| 665 | 1120 | ACTTCAGGCTCTGGTGAGAC | 1619 | GTCTCACCAGAGCCTGAAGT |
| 666 | 1121 | GACTTCAGGCTCTGGTGAGA | 1620 | TCTCACCAGAGCCTGAAGTC |
| 667 | 1122 | GGACTTCAGGCTCTGGTGAG | 1621 | CTCACCAGAGCCTGAAGTCC |
| 668 | 1123 | TGGACTTCAGGCTCTGGTGA | 1622 | TCACCAGAGCCTGAAGTCCA |
| 669 | 1124 | ATGGACTTCAGGCTCTGGTG | 1623 | CACCAGAGCCTGAAGTCCAT |
| 670 | 1125 | CATGGACTTCAGGCTCTGGT | 1624 | ACCAGAGCCTGAAGTCCATG |
| 671 | 1126 | TCATGGACTTCAGGCTCTGG | 1625 | CCAGAGCCTGAAGTCCATGA |
| 672 | 1127 | ATCATGGACTTCAGGCTCTG | 1626 | CAGAGCCTGAAGTCCATGAT |
| 673 | 1128 | TATCATGGACTTCAGGCTCT | 1627 | AGAGCCTGAAGTCCATGATA |
| 674 | 1129 | ATATCATGGACTTCAGGCTC | 1628 | GAGCCTGAAGTCCATGATAT |
| 675 | 1130 | AATATCATGGACTTCAGGCT | 1629 | AGCCTGAAGTCCATGATATT |
| 676 | 1131 | CAATATCATGGACTTCAGGC | 1630 | GCCTGAAGTCCATGATATTG |
| 677 | 1132 | TCAATATCATGGACTTCAGG | 1631 | CCTGAAGTCCATGATATTGA |
| 678 | 1133 | TTCAATATCATGGACTTCAG | 1632 | CTGAAGTCCATGATATTGAA |
| 679 | 1134 | TTTCAATATCATGGACTTCA | 1633 | TGAAGTCCATGATATTGAAA |
| 680 | 1135 | CTTTCAATATCATGGACTTC | 1634 | GAAGTCCATGATATTGAAAG |
| 681 | 1136 | TCTTTCAATATCATGGACTT | 1635 | AAGTCCATGATATTGAAAGA |
| 682 | 1137 | ATCTTTCAATATCATGGACT | 1636 | AGTCCATGATATTGAAAGAT |
| 683 | 1138 | GATCTTTCAATATCATGGAC | 1637 | GTCCATGATATTGAAAGATC |
| 684 | 1139 | AGATCTTTCAATATCATGGA | 1638 | TCCATGATATTGAAAGATCT |
| 685 | 1140 | CAGATCTTTCAATATCATGG | 1639 | CCATGATATTGAAAGATCTG |
| 686 | 1141 | TCAGATCTTTCAATATCATG | 1640 | CATGATATTGAAAGATCTGA |
| 687 | 1142 | TTCAGATCTTTCAATATCAT | 1641 | ATGATATTGAAAGATCTGAA |
| 688 | 1143 | CTTCAGATCTTTCAATATCA | 1642 | TGATATTGAAAGATCTGAAG |
| 689 | 1144 | TCTTCAGATCTTTCAATATC | 1643 | GATATTGAAAGATCTGAAGA |
| 690 | 1145 | TTCTTCAGATCTTTCAATAT | 1644 | ATATTGAAAGATCTGAAGAA |
| 691 | 1146 | CTTCTTCAGATCTTTCAATA | 1645 | TATTGAAAGATCTGAAGAAG |
| 692 | 1147 | TCTTCTTCAGATCTTTCAAT | 1646 | ATTGAAAGATCTGAAGAAGA |
| 693 | 1148 | ATCTTCTTCAGATCTTTCAA | 1647 | TTGAAAGATCTGAAGAAGAT |
| 694 | 1149 | CATCTTCTTCAGATCTTTCA | 1648 | TGAAAGATCTGAAGAAGATG |
| 695 | 1150 | TCATCTTCTTCAGATCTTTC | 1649 | GAAAGATCTGAAGAAGATGA |
| 696 | 1151 | ATCATCTTCTTCAGATCTTT | 1650 | AAAGATCTGAAGAAGATGAT |
| 697 | 1152 | GATCATCTTCTTCAGATCTT | 1651 | AAGATCTGAAGAAGATGATC |
| 698 | 1153 | TGATCATCTTCTTCAGATCT | 1652 | AGATCTGAAGAAGATGATCA |
| 699 | 1154 | CTGATCATCTTCTTCAGATC | 1653 | GATCTGAAGAAGATGATCAG |
| 700 | 1155 | ACTGATCATCTTCTTCAGAT | 1654 | ATCTGAAGAAGATGATCAGT |
| 701 | 1156 | AACTGATCATCTTCTTCAGA | 1655 | TCTGAAGAAGATGATCAGTT |
| 702 | 1157 | GAACTGATCATCTTCTTCAG | 1656 | CTGAAGAAGATGATCAGTTC |
| 703 | 1158 | TGAACTGATCATCTTCTTCA | 1657 | TGAAGAAGATGATCAGTTCA |
| 704 | 1159 | ATGAACTGATCATCTTCTTC | 1658 | GAAGAAGATGATCAGTTCAT |
| 705 | 1160 | AATGAACTGATCATCTTCTT | 1659 | AAGAAGATGATCAGTTCATT |
| 706 | 1161 | TAATGAACTGATCATCTTCT | 1660 | AGAAGATGATCAGTTCATTA |
| 707 | 1162 | ATAATGAACTGATCATCTTC | 1661 | GAAGATGATCAGTTCATTAT |
| 708 | 1163 | GATAATGAACTGATCATCTT | 1662 | AAGATGATCAGTTCATTATC |
| 709 | 1164 | GGATAATGAACTGATCATCT | 1663 | AGATGATCAGTTCATTATCC |
| 710 | 1165 | AGGATAATGAACTGATCATC | 1664 | GATGATCAGTTCATTATCCT |
| 711 | 1166 | AAGGATAATGAACTGATCAT | 1665 | ATGATCAGTTCATTATCCTT |
| 712 | 1167 | CAAGGATAATGAACTGATCA | 1666 | TGATCAGTTCATTATCCTTG |
| 713 | 1168 | GCAAGGATAATGAACTGATC | 1667 | GATCAGTTCATTATCCTTGC |
| 714 | 1169 | TGCAAGGATAATGAACTGAT | 1668 | ATCAGTTCATTATCCTTGCA |
| 715 | 1170 | ATGCAAGGATAATGAACTGA | 1669 | TCAGTTCATTATCCTTGCAT |
| 716 | 1171 | CATGCAAGGATAATGAACTG | 1670 | CAGTTCATTATCCTTGCATG |
| 717 | 1172 | ACATGCAAGGATAATGAACT | 1671 | AGTTCATTATCCTTGCATGT |
| 718 | 1173 | CACATGCAAGGATAATGAAC | 1672 | GTTCATTATCCTTGCATGTG |
| 719 | 1174 | TCACATGCAAGGATAATGAA | 1673 | TTCATTATCCTTGCATGTGA |
| 720 | 1175 | ATCACATGCAAGGATAATGA | 1674 | TCATTATCCTTGCATGTGAT |
| 721 | 1176 | CATCACATGCAAGGATAATG | 1675 | CATTATCCTTGCATGTGATG |
| 722 | 1177 | CCATCACATGCAAGGATAAT | 1676 | ATTATCCTTGCATGTGATGG |
| 723 | 1178 | ACCATCACATGCAAGGATAA | 1677 | TTATCCTTGCATGTGATGGT |
| 724 | 1179 | TACCATCACATGCAAGGATA | 1678 | TATCCTTGCATGTGATGGTA |
| 725 | 1180 | ATACCATCACATGCAAGGAT | 1679 | ATCCTTGCATGTGATGGTAT |
| 726 | 1181 | GATACCATCACATGCAAGGA | 1680 | TCCTTGCATGTGATGGTATC |
| 727 | 1182 | AGATACCATCACATGCAAGG | 1681 | CCTTGCATGTGATGGTATCT |
| 728 | 1183 | CAGATACCATCACATGCAAG | 1682 | CTTGCATGTGATGGTATCTG |
| 729 | 1184 | CCAGATACCATCACATGCAA | 1683 | TTGCATGTGATGGTATCTGG |
| 730 | 1185 | CCCAGATACCATCACATGCA | 1684 | TGCATGTGATGGTATCTGGG |
| 731 | 1186 | TCCCAGATACCATCACATGC | 1685 | GCATGTGATGGTATCTGGGA |
| 732 | 1187 | ATCCCAGATACCATCACATG | 1686 | CATGTGATGGTATCTGGGAT |
| 733 | 1188 | CATCCCAGATACCATCACAT | 1687 | ATGTGATGGTATCTGGGATG |
| 734 | 1189 | ACATCCCAGATACCATCACA | 1688 | TGTGATGGTATCTGGGATGT |
| 735 | 1190 | AACATCCCAGATACCATCAC | 1689 | GTGATGGTATCTGGGATGTT |
| 736 | 1191 | TAACATCCCAGATACCATCA | 1690 | TGATGGTATCTGGGATGTTA |
| 737 | 1192 | ATAACATCCCAGATACCATC | 1691 | GATGGTATCTGGGATGTTAT |
| 738 | 1193 | CATAACATCCCAGATACCAT | 1692 | ATGGTATCTGGGATGTTATG |
| 739 | 1194 | CCATAACATCCCAGATACCA | 1693 | TGGTATCTGGGATGTTATGG |
| 740 | 1195 | CCCATAACATCCCAGATACC | 1694 | GGTATCTGGGATGTTATGGG |
| 741 | 1196 | TCCCATAACATCCCAGATAC | 1695 | GTATCTGGGATGTTATGGGA |
| 742 | 1197 | TTCCCATAACATCCCAGATA | 1696 | TATCTGGGATGTTATGGGAA |
| 743 | 1198 | TTTCCCATAACATCCCAGAT | 1697 | ATCTGGGATGTTATGGGAAA |
| 744 | 1199 | ATTTCCCATAACATCCCAGA | 1698 | TCTGGGATGTTATGGGAAAT |
| 745 | 1200 | CATTTCCCATAACATCCCAG | 1699 | CTGGGATGTTATGGGAAATG |
| 746 | 1201 | TCATTTCCCATAACATCCCA | 1700 | TGGGATGTTATGGGAAATGA |
| 747 | 1202 | TTCATTTCCCATAACATCCC | 1701 | GGGATGTTATGGGAAATGAA |
| 748 | 1203 | CTTCATTTCCCATAACATCC | 1702 | GGATGTTATGGGAAATGAAG |
| 749 | 1204 | TCTTCATTTCCCATAACATC | 1703 | GATGTTATGGGAAATGAAGA |
| 750 | 1205 | CTCTTCATTTCCCATAACAT | 1704 | ATGTTATGGGAAATGAAGAG |
| 751 | 1206 | GCTCTTCATTTCCCATAACA | 1705 | TGTTATGGGAAATGAAGAGC |
| 752 | 1207 | AGCTCTTCATTTCCCATAAC | 1706 | GTTATGGGAAATGAAGAGCT |
| 753 | 1208 | GAGCTCTTCATTTCCCATAA | 1707 | TTATGGGAAATGAAGAGCTC |
| 754 | 1209 | AGAGCTCTTCATTTCCCATA | 1708 | TATGGGAAATGAAGAGCTCT |
| 755 | 1210 | CAGAGCTCTTCATTTCCCAT | 1709 | ATGGGAAATGAAGAGCTCTG |
| 756 | 1211 | ACAGAGCTCTTCATTTCCCA | 1710 | TGGGAAATGAAGAGCTCTGT |
| 757 | 1212 | CACAGAGCTCTTCATTTCCC | 1711 | GGGAAATGAAGAGCTCTGTG |
| 758 | 1213 | TCACAGAGCTCTTCATTTCC | 1712 | GGAAATGAAGAGCTCTGTGA |
| 759 | 1214 | ATCACAGAGCTCTTCATTTC | 1713 | GAAATGAAGAGCTCTGTGAT |
| 760 | 1215 | AATCACAGAGCTCTTCATTT | 1714 | AAATGAAGAGCTCTGTGATT |
| 761 | 1216 | AAATCACAGAGCTCTTCATT | 1715 | AATGAAGAGCTCTGTGATTT |
| 762 | 1217 | AAAATCACAGAGCTCTTCAT | 1716 | ATGAAGAGCTCTGTGATTTT |
| 763 | 1218 | CAAAATCACAGAGCTCTTCA | 1717 | TGAAGAGCTCTGTGATTTTG |
| 764 | 1219 | ACAAAATCACAGAGCTCTTC | 1718 | GAAGAGCTCTGTGATTTTGT |
| 765 | 1220 | TACAAAATCACAGAGCTCTT | 1719 | AAGAGCTCTGTGATTTTGTA |
| 766 | 1221 | TTACAAAATCACAGAGCTCT | 1720 | AGAGCTCTGTGATTTTGTAA |
| 767 | 1222 | CTTACAAAATCACAGAGCTC | 1721 | GAGCTCTGTGATTTTGTAAG |
| 768 | 1223 | TCTTACAAAATCACAGAGCT | 1722 | AGCTCTGTGATTTTGTAAGA |
| 769 | 1224 | ATCTTACAAAATCACAGAGC | 1723 | GCTCTGTGATTTTGTAAGAT |
| 770 | 1225 | GATCTTACAAAATCACAGAG | 1724 | CTCTGTGATTTTGTAAGATC |
| 771 | 1226 | GGATCTTACAAAATCACAGA | 1725 | TCTGTGATTTTGTAAGATCC |
| 772 | 1227 | TGGATCTTACAAAATCACAG | 1726 | CTGTGATTTTGTAAGATCCA |
| 773 | 1228 | CTGGATCTTACAAAATCACA | 1727 | TGTGATTTTGTAAGATCCAG |
| 774 | 1229 | TCTGGATCTTACAAAATCAC | 1728 | GTGATTTTGTAAGATCCAGA |
| 775 | 1230 | GTCTGGATCTTACAAAATCA | 1729 | TGATTTTGTAAGATCCAGAC |
| 776 | 1231 | AGTCTGGATCTTACAAAATC | 1730 | GATTTTGTAAGATCCAGACT |
| 777 | 1232 | AAGTCTGGATCTTACAAAAT | 1731 | ATTTTGTAAGATCCAGACTT |
| 778 | 1233 | CAAGTCTGGATCTTACAAAA | 1732 | TTTTGTAAGATCCAGACTTG |
| 779 | 1234 | TCAAGTCTGGATCTTACAAA | 1733 | TTTGTAAGATCCAGACTTGA |
| 780 | 1235 | TTCAAGTCTGGATCTTACAA | 1734 | TTGTAAGATCCAGACTTGAA |
| 781 | 1236 | CTTCAAGTCTGGATCTTACA | 1735 | TGTAAGATCCAGACTTGAAG |
| 782 | 1237 | ACTTCAAGTCTGGATCTTAC | 1736 | GTAAGATCCAGACTTGAAGT |
| 783 | 1238 | GACTTCAAGTCTGGATCTTA | 1737 | TAAGATCCAGACTTGAAGTC |
| 784 | 1239 | TGACTTCAAGTCTGGATCTT | 1738 | AAGATCCAGACTTGAAGTCA |
| 785 | 1240 | GTGACTTCAAGTCTGGATCT | 1739 | AGATCCAGACTTGAAGTCAC |
| 786 | 1241 | AGTGACTTCAAGTCTGGATC | 1740 | GATCCAGACTTGAAGTCACT |
| 787 | 1242 | CAGTGACTTCAAGTCTGGAT | 1741 | ATCCAGACTTGAAGTCACTG |
| 788 | 1243 | TCAGTGACTTCAAGTCTGGA | 1742 | TCCAGACTTGAAGTCACTGA |
| 789 | 1244 | ATCAGTGACTTCAAGTCTGG | 1743 | CCAGACTTGAAGTCACTGAT |
| 790 | 1245 | CATCAGTGACTTCAAGTCTG | 1744 | CAGACTTGAAGTCACTGATG |
| 791 | 1246 | TCATCAGTGACTTCAAGTCT | 1745 | AGACTTGAAGTCACTGATGA |
| 792 | 1247 | GTCATCAGTGACTTCAAGTC | 1746 | GACTTGAAGTCACTGATGAC |
| 793 | 1248 | GGTCATCAGTGACTTCAAGT | 1747 | ACTTGAAGTCACTGATGACC |
| 794 | 1249 | AGGTCATCAGTGACTTCAAG | 1748 | CTTGAAGTCACTGATGACCT |
| 795 | 1250 | AAGGTCATCAGTGACTTCAA | 1749 | TTGAAGTCACTGATGACCTT |
| 796 | 1251 | CAAGGTCATCAGTGACTTCA | 1750 | TGAAGTCACTGATGACCTTG |
| 797 | 1252 | TCAAGGTCATCAGTGACTTC | 1751 | GAAGTCACTGATGACCTTGA |
| 798 | 1253 | CTCAAGGTCATCAGTGACTT | 1752 | AAGTCACTGATGACCTTGAG |
| 799 | 1254 | TCTCAAGGTCATCAGTGACT | 1753 | AGTCACTGATGACCTTGAGA |
| 800 | 1255 | TTCTCAAGGTCATCAGTGAC | 1754 | GTCACTGATGACCTTGAGAA |
| 801 | 1256 | TTTCTCAAGGTCATCAGTGA | 1755 | TCACTGATGACCTTGAGAAA |
| 802 | 1257 | CTTTCTCAAGGTCATCAGTG | 1756 | CACTGATGACCTTGAGAAAG |
| 803 | 1258 | ACTTTCTCAAGGTCATCAGT | 1757 | ACTGATGACCTTGAGAAAGT |
| 804 | 1259 | AACTTTCTCAAGGTCATCAG | 1758 | CTGATGACCTTGAGAAAGTT |
| 805 | 1260 | AAACTTTCTCAAGGTCATCA | 1759 | TGATGACCTTGAGAAAGTTT |
| 806 | 1261 | CAAACTTTCTCAAGGTCATC | 1760 | GATGACCTTGAGAAAGTTTG |
| 807 | 1262 | GCAAACTTTCTCAAGGTCAT | 1761 | ATGACCTTGAGAAAGTTTGC |
| 808 | 1263 | TGCAAACTTTCTCAAGGTCA | 1762 | TGACCTTGAGAAAGTTTGCA |
| 809 | 1264 | TTGCAAACTTTCTCAAGGTC | 1763 | GACCTTGAGAAAGTTTGCAA |
| 810 | 1265 | ATTGCAAACTTTCTCAAGGT | 1764 | ACCTTGAGAAAGTTTGCAAT |
| 811 | 1266 | CATTGCAAACTTTCTCAAGG | 1765 | CCTTGAGAAAGTTTGCAATG |
| 812 | 1267 | TCATTGCAAACTTTCTCAAG | 1766 | CTTGAGAAAGTTTGCAATGA |
| 813 | 1268 | TTCATTGCAAACTTTCTCAA | 1767 | TTGAGAAAGTTTGCAATGAA |
| 814 | 1269 | CTTCATTGCAAACTTTCTCA | 1768 | TGAGAAAGTTTGCAATGAAG |
| 815 | 1270 | ACTTCATTGCAAACTTTCTC | 1769 | GAGAAAGTTTGCAATGAAGT |
| 816 | 1271 | TACTTCATTGCAAACTTTCT | 1770 | AGAAAGTTTGCAATGAAGTA |
| 817 | 1272 | CTACTTCATTGCAAACTTTC | 1771 | GAAAGTTTGCAATGAAGTAG |
| 818 | 1273 | ACTACTTCATTGCAAACTTT | 1772 | AAAGTTTGCAATGAAGTAGT |
| 819 | 1274 | GACTACTTCATTGCAAACTT | 1773 | AAGTTTGCAATGAAGTAGTC |
| 820 | 1275 | CGACTACTTCATTGCAAACT | 1774 | AGTTTGCAATGAAGTAGTCG |
| 821 | 1276 | TCGACTACTTCATTGCAAAC | 1775 | GTTTGCAATGAAGTAGTCGA |
| 822 | 1277 | GTCGACTACTTCATTGCAAA | 1776 | TTTGCAATGAAGTAGTCGAC |
| 823 | 1278 | TGTCGACTACTTCATTGCAA | 1777 | TTGCAATGAAGTAGTCGACA |
| 824 | 1279 | GTGTCGACTACTTCATTGCA | 1778 | TGCAATGAAGTAGTCGACAC |
| 825 | 1280 | GGTGTCGACTACTTCATTGC | 1779 | GCAATGAAGTAGTCGACACC |
| 826 | 1281 | AGGTGTCGACTACTTCATTG | 1780 | CAATGAAGTAGTCGACACCT |
| 827 | 1282 | CAGGTGTCGACTACTTCATT | 1781 | AATGAAGTAGTCGACACCTG |
| 828 | 1283 | ACAGGTGTCGACTACTTCAT | 1782 | ATGAAGTAGTCGACACCTGT |
| 829 | 1284 | AACAGGTGTCGACTACTTCA | 1783 | TGAAGTAGTCGACACCTGTT |
| 830 | 1285 | AAACAGGTGTCGACTACTTC | 1784 | GAAGTAGTCGACACCTGTTT |
| 831 | 1286 | CAAACAGGTGTCGACTACTT | 1785 | AAGTAGTCGACACCTGTTTG |
| 832 | 1287 | ACAAACAGGTGTCGACTACT | 1786 | AGTAGTCGACACCTGTTTGT |
| 833 | 1288 | TACAAACAGGTGTCGACTAC | 1787 | GTAGTCGACACCTGTTTGTA |
| 834 | 1289 | ATACAAACAGGTGTCGACTA | 1788 | TAGTCGACACCTGTTTGTAT |
| 835 | 1290 | TATACAAACAGGTGTCGACT | 1789 | AGTCGACACCTGTTTGTATA |
| 836 | 1291 | TTATACAAACAGGTGTCGAC | 1790 | GTCGACACCTGTTTGTATAA |
| 837 | 1292 | CTTATACAAACAGGTGTCGA | 1791 | TCGACACCTGTTTGTATAAG |
| 838 | 1293 | CCTTATACAAACAGGTGTCG | 1792 | CGACACCTGTTTGTATAAGG |
| 839 | 1294 | CCCTTATACAAACAGGTGTC | 1793 | GACACCTGTTTGTATAAGGG |
| 840 | 1295 | TCCCTTATACAAACAGGTGT | 1794 | ACACCTGTTTGTATAAGGGA |
| 841 | 1296 | TTCCCTTATACAAACAGGTG | 1795 | CACCTGTTTGTATAAGGGAA |
| 842 | 1297 | CTTCCCTTATACAAACAGGT | 1796 | ACCTGTTTGTATAAGGGAAG |
| 843 | 1298 | ACTTCCCTTATACAAACAGG | 1797 | CCTGTTTGTATAAGGGAAGT |
| 844 | 1299 | GACTTCCCTTATACAAACAG | 1798 | CTGTTTGTATAAGGGAAGTC |
| 845 | 1300 | CGACTTCCCTTATACAAACA | 1799 | TGTTTGTATAAGGGAAGTCG |
| 846 | 1301 | TCGACTTCCCTTATACAAAC | 1800 | GTTTGTATAAGGGAAGTCGA |
| 847 | 1302 | CTCGACTTCCCTTATACAAA | 1801 | TTTGTATAAGGGAAGTCGAG |
| 848 | 1303 | TCTCGACTTCCCTTATACAA | 1802 | TTGTATAAGGGAAGTCGAGA |
| 849 | 1304 | GTCTCGACTTCCCTTATACA | 1803 | TGTATAAGGGAAGTCGAGAC |
| 850 | 1305 | TGTCTCGACTTCCCTTATAC | 1804 | GTATAAGGGAAGTCGAGACA |
| 851 | 1306 | TTGTCTCGACTTCCCTTATA | 1805 | TATAAGGGAAGTCGAGACAA |
| 852 | 1307 | GTTGTCTCGACTTCCCTTAT | 1806 | ATAAGGGAAGTCGAGACAAC |
| 853 | 1308 | TGTTGTCTCGACTTCCCTTA | 1807 | TAAGGGAAGTCGAGACAACA |
| 854 | 1309 | ATGTTGTCTCGACTTCCCTT | 1808 | AAGGGAAGTCGAGACAACAT |
| 855 | 1310 | CATGTTGTCTCGACTTCCCT | 1809 | AGGGAAGTCGAGACAACATG |
| 856 | 1311 | TCATGTTGTCTCGACTTCCC | 1810 | GGGAAGTCGAGACAACATGA |
| 857 | 1312 | CTCATGTTGTCTCGACTTCC | 1811 | GGAAGTCGAGACAACATGAG |
| 858 | 1313 | ACTCATGTTGTCTCGACTTC | 1812 | GAAGTCGAGACAACATGAGT |
| 859 | 1314 | CACTCATGTTGTCTCGACTT | 1813 | AAGTCGAGACAACATGAGTG |
| 860 | 1315 | ACACTCATGTTGTCTCGACT | 1814 | AGTCGAGACAACATGAGTGT |
| 861 | 1316 | CACACTCATGTTGTCTCGAC | 1815 | GTCGAGACAACATGAGTGTG |
| 862 | 1317 | TCACACTCATGTTGTCTCGA | 1816 | TCGAGACAACATGAGTGTGA |
| 863 | 1318 | ATCACACTCATGTTGTCTCG | 1817 | CGAGACAACATGAGTGTGAT |
| 864 | 1319 | AATCACACTCATGTTGTCTC | 1818 | GAGACAACATGAGTGTGATT |
| 865 | 1320 | AAATCACACTCATGTTGTCT | 1819 | AGACAACATGAGTGTGATTT |
| 866 | 1321 | AAAATCACACTCATGTTGTC | 1820 | GACAACATGAGTGTGATTTT |
| 867 | 1322 | CAAAATCACACTCATGTTGT | 1821 | ACAACATGAGTGTGATTTTG |
| 868 | 1323 | TCAAAATCACACTCATGTTG | 1822 | CAACATGAGTGTGATTTTGA |
| 869 | 1324 | ATCAAAATCACACTCATGTT | 1823 | AACATGAGTGTGATTTTGAT |
| 870 | 1325 | GATCAAAATCACACTCATGT | 1824 | ACATGAGTGTGATTTTGATC |
| 871 | 1326 | AGATCAAAATCACACTCATG | 1825 | CATGAGTGTGATTTTGATCT |
| 872 | 1327 | CAGATCAAAATCACACTCAT | 1826 | ATGAGTGTGATTTTGATCTG |
| 873 | 1328 | ACAGATCAAAATCACACTCA | 1827 | TGAGTGTGATTTTGATCTGT |
| 874 | 1329 | AACAGATCAAAATCACACTC | 1828 | GAGTGTGATTTTGATCTGTT |
| 875 | 1330 | AAACAGATCAAAATCACACT | 1829 | AGTGTGATTTTGATCTGTTT |
| 876 | 1331 | AAAACAGATCAAAATCACAC | 1830 | GTGTGATTTTGATCTGTTTT |
| 877 | 1332 | GAAAACAGATCAAAATCACA | 1831 | TGTGATTTTGATCTGTTTTC |
| 878 | 1333 | GGAAAACAGATCAAAATCAC | 1832 | GTGATTTTGATCTGTTTTCC |
| 879 | 1334 | TGGAAAACAGATCAAAATCA | 1833 | TGATTTTGATCTGTTTTCCA |
| 880 | 1335 | TTGGAAAACAGATCAAAATC | 1834 | GATTTTGATCTGTTTTCCAA |
| 881 | 1336 | TTTGGAAAACAGATCAAAAT | 1835 | ATTTTGATCTGTTTTCCAAA |
| 882 | 1337 | ATTTGGAAAACAGATCAAAA | 1836 | TTTTGATCTGTTTTCCAAAT |
| 883 | 1338 | CATTTGGAAAACAGATCAAA | 1837 | TTTGATCTGTTTTCCAAATG |
| 884 | 1339 | GCATTTGGAAAACAGATCAA | 1838 | TTGATCTGTTTTCCAAATGC |
| 885 | 1340 | TGCATTTGGAAAACAGATCA | 1839 | TGATCTGTTTTCCAAATGCA |
| 886 | 1341 | GTGCATTTGGAAAACAGATC | 1840 | GATCTGTTTTCCAAATGCAC |
| 887 | 1342 | GGTGCATTTGGAAAACAGAT | 1841 | ATCTGTTTTCCAAATGCACC |
| 888 | 1343 | GGGTGCATTTGGAAAACAGA | 1842 | TCTGTTTTCCAAATGCACCC |
| 889 | 1344 | TGGGTGCATTTGGAAAACAG | 1843 | CTGTTTTCCAAATGCACCCA |
| 890 | 1345 | TTGGGTGCATTTGGAAAACA | 1844 | TGTTTTCCAAATGCACCCAA |
| 891 | 1346 | TTTGGGTGCATTTGGAAAAC | 1845 | GTTTTCCAAATGCACCCAAA |
| 892 | 1347 | CTTTGGGTGCATTTGGAAAA | 1846 | TTTTCCAAATGCACCCAAAG |
| 893 | 1348 | ACTTTGGGTGCATTTGGAAA | 1847 | TTTCCAAATGCACCCAAAGT |
| 894 | 1349 | TACTTTGGGTGCATTTGGAA | 1848 | TTCCAAATGCACCCAAAGTA |
| 895 | 1350 | ATACTTTGGGTGCATTTGGA | 1849 | TCCAAATGCACCCAAAGTAT |
| 896 | 1351 | GATACTTTGGGTGCATTTGG | 1850 | CCAAATGCACCCAAAGTATC |
| 897 | 1352 | CGATACTTTGGGTGCATTTG | 1851 | CAAATGCACCCAAAGTATCG |
| 898 | 1353 | GCGATACTTTGGGTGCATTT | 1852 | AAATGCACCCAAAGTATCGC |
| 899 | 1354 | GGCGATACTTTGGGTGCATT | 1853 | AATGCACCCAAAGTATCGCC |
| 900 | 1355 | TGGCGATACTTTGGGTGCAT | 1854 | ATGCACCCAAAGTATCGCCA |
| 901 | 1356 | CTGGCGATACTTTGGGTGCA | 1855 | TGCACCCAAAGTATCGCCAG |
| 902 | 1357 | TCTGGCGATACTTTGGGTGC | 1856 | GCACCCAAAGTATCGCCAGA |
| 903 | 1358 | TTCTGGCGATACTTTGGGTG | 1857 | CACCCAAAGTATCGCCAGAA |
| 904 | 1359 | CTTCTGGCGATACTTTGGGT | 1858 | ACCCAAAGTATCGCCAGAAG |
| 905 | 1360 | GCTTCTGGCGATACTTTGGG | 1859 | CCCAAAGTATCGCCAGAAGC |
| 906 | 1361 | TGCTTCTGGCGATACTTTGG | 1860 | CCAAAGTATCGCCAGAAGCA |
| 907 | 1362 | CTGCTTCTGGCGATACTTTG | 1861 | CAAAGTATCGCCAGAAGCAG |
| 908 | 1363 | ACTGCTTCTGGCGATACTTT | 1862 | AAAGTATCGCCAGAAGCAGT |
| 909 | 1364 | CACTGCTTCTGGCGATACTT | 1863 | AAGTATCGCCAGAAGCAGTG |
| 910 | 1365 | TCACTGCTTCTGGCGATACT | 1864 | AGTATCGCCAGAAGCAGTGA |
| 911 | 1366 | TTCACTGCTTCTGGCGATAC | 1865 | GTATCGCCAGAAGCAGTGAA |
| 912 | 1367 | CTTCACTGCTTCTGGCGATA | 1866 | TATCGCCAGAAGCAGTGAAG |
| 913 | 1368 | TCTTCACTGCTTCTGGCGAT | 1867 | ATCGCCAGAAGCAGTGAAGA |
| 914 | 1369 | TTCTTCACTGCTTCTGGCGA | 1868 | TCGCCAGAAGCAGTGAAGAA |
| 915 | 1370 | CTTCTTCACTGCTTCTGGCG | 1869 | CGCCAGAAGCAGTGAAGAAG |
| 916 | 1371 | CCTTCTTCACTGCTTCTGGC | 1870 | GCCAGAAGCAGTGAAGAAGG |
| 917 | 1372 | TCCTTCTTCACTGCTTCTGG | 1871 | CCAGAAGCAGTGAAGAAGGA |
| 918 | 1373 | CTCCTTCTTCACTGCTTCTG | 1872 | CAGAAGCAGTGAAGAAGGAG |
| 919 | 1374 | CCTCCTTCTTCACTGCTTCT | 1873 | AGAAGCAGTGAAGAAGGAGG |
| 920 | 1375 | GCCTCCTTCTTCACTGCTTC | 1874 | GAAGCAGTGAAGAAGGAGGC |
| 921 | 1376 | TGCCTCCTTCTTCACTGCTT | 1875 | AAGCAGTGAAGAAGGAGGCA |
| 922 | 1377 | CTGCCTCCTTCTTCACTGCT | 1876 | AGCAGTGAAGAAGGAGGCAG |
| 923 | 1378 | TCTGCCTCCTTCTTCACTGC | 1877 | GCAGTGAAGAAGGAGGCAGA |
| 924 | 1379 | CTCTGCCTCCTTCTTCACTG | 1878 | CAGTGAAGAAGGAGGCAGAG |
| 925 | 1380 | ACTCTGCCTCCTTCTTCACT | 1879 | AGTGAAGAAGGAGGCAGAGT |
| 926 | 1381 | AACTCTGCCTCCTTCTTCAC | 1880 | GTGAAGAAGGAGGCAGAGTT |
| 927 | 1382 | CAACTCTGCCTCCTTCTTCA | 1881 | TGAAGAAGGAGGCAGAGTTG |
| 928 | 1383 | CCAACTCTGCCTCCTTCTTC | 1882 | GAAGAAGGAGGCAGAGTTGG |
| 929 | 1384 | TCCAACTCTGCCTCCTTCTT | 1883 | AAGAAGGAGGCAGAGTTGGA |
| 930 | 1385 | GTCCAACTCTGCCTCCTTCT | 1884 | AGAAGGAGGCAGAGTTGGAC |
| 931 | 1386 | TGTCCAACTCTGCCTCCTTC | 1885 | GAAGGAGGCAGAGTTGGACA |
| 932 | 1387 | TTGTCCAACTCTGCCTCCTT | 1886 | AAGGAGGCAGAGTTGGACAA |
| 933 | 1388 | CTTGTCCAACTCTGCCTCCT | 1887 | AGGAGGCAGAGTTGGACAAG |
| 934 | 1389 | ACTTGTCCAACTCTGCCTCC | 1888 | GGAGGCAGAGTTGGACAAGT |
| 935 | 1390 | TACTTGTCCAACTCTGCCTC | 1889 | GAGGCAGAGTTGGACAAGTA |
| 936 | 1391 | GTACTTGTCCAACTCTGCCT | 1890 | AGGCAGAGTTGGACAAGTAC |
| 937 | 1392 | GGTACTTGTCCAACTCTGCC | 1891 | GGCAGAGTTGGACAAGTACC |
| 938 | 1393 | AGGTACTTGTCCAACTCTGC | 1892 | GCAGAGTTGGACAAGTACCT |
| 939 | 1394 | CAGGTACTTGTCCAACTCTG | 1893 | CAGAGTTGGACAAGTACCTG |
| 940 | 1395 | CCAGGTACTTGTCCAACTCT | 1894 | AGAGTTGGACAAGTACCTGG |
| 941 | 1396 | TCCAGGTACTTGTCCAACTC | 1895 | GAGTTGGACAAGTACCTGGA |
| 942 | 1397 | TTCCAGGTACTTGTCCAACT | 1896 | AGTTGGACAAGTACCTGGAA |
| 943 | 1398 | ATTCCAGGTACTTGTCCAAC | 1897 | GTTGGACAAGTACCTGGAAT |
| 944 | 1399 | CATTCCAGGTACTTGTCCAA | 1898 | TTGGACAAGTACCTGGAATG |
| 945 | 1400 | GCATTCCAGGTACTTGTCCA | 1899 | TGGACAAGTACCTGGAATGC |
| 946 | 1401 | TGCATTCCAGGTACTTGTCC | 1900 | GGACAAGTACCTGGAATGCA |
| 947 | 1402 | CTGCATTCCAGGTACTTGTC | 1901 | GACAAGTACCTGGAATGCAG |
| 948 | 1403 | TCTGCATTCCAGGTACTTGT | 1902 | ACAAGTACCTGGAATGCAGA |
| 949 | 1404 | CTCTGCATTCCAGGTACTTG | 1903 | CAAGTACCTGGAATGCAGAG |
| 950 | 1405 | ACTCTGCATTCCAGGTACTT | 1904 | AAGTACCTGGAATGCAGAGT |
| 951 | 1406 | TACTCTGCATTCCAGGTACT | 1905 | AGTACCTGGAATGCAGAGTA |
| 952 | 1407 | CTACTCTGCATTCCAGGTAC | 1906 | GTACCTGGAATGCAGAGTAG |
| 953 | 1408 | TCTACTCTGCATTCCAGGTA | 1907 | TACCTGGAATGCAGAGTAGA |
| 954 | 1409 | TTCTACTCTGCATTCCAGGT | 1908 | ACCTGGAATGCAGAGTAGAA |
| 955 | 1410 | CTTCTACTCTGCATTCCAGG | 1909 | CCTGGAATGCAGAGTAGAAG |

*At least one nucleoside linkage of the oligonucleotide is selected from a phosphorothioate linkage, an alkyl phosphate linkage, an alkylphosphonate linkage, a 3-methoxypropyl phosphonate linkage, a phosphorodithioate linkage, a phosphotriester linkage, a methylphosphonate linkage, an aminoalkylphosphotriester linkage, an alkylene phosphonate linkage, a phosphinate linkage, a phosphoramidate linkage, a phosphoramidothioate linkage, a phosphorodiamidate (e.g., comprising a phosphorodiamidate morpholino (PMO), 3′ amino ribose, or 5′ amino ribose) linkage, an aminoalkylphosphoramidate linkage, a thiophosphoramidate linkage, a thionoalkylphosphonate linkage, a thionoalkylphosphotriester linkage, a thiophosphate linkage, a sclenophosphate linkage, and a boranophosphate linkage

[0183] Table 2 below identifies PPM1A AON sequences.

TABLE 2
PPM1A AON Sequences. In comparison to Table 1,
the PPM1A AON sequences here have uracil
nucleobases in place of thymine nucleobases.

| SEQ | | SEQ | |
|---|---|---|---|
| ID | AON | ID | |
| NO: | Sequence (5′→3′) | NO: | AON Sequence (5′→3′) |
| 1910 | AUGUCUUGAUCCUCUAGGUC | 2387 | AAAUGAACUUUCCUGUUCCU |
| 1911 | UAUGUCUUGAUCCUCUAGGU | 2388 | GAAAUGAACUUUCCUGUUCC |
| 1912 | UUAUGUCUUGAUCCUCUAGG | 2389 | AGAAAUGAACUUUCCUGUUC |
| 1913 | AUUAUGUCUUGAUCCUCUAG | 2390 | AAGAAAUGAACUUUCCUGUU |
| 1914 | CAUUAUGUCUUGAUCCUCUA | 2391 | GAAGAAAUGAACUUUCCUGU |
| 1915 | CCAUUAUGUCUUGAUCCUCU | 2392 | UGAAGAAAUGAACUUUCCUG |
| 1916 | CCCAUUAUGUCUUGAUCCUC | 2393 | GUGAAGAAAUGAACUUUCCU |
| 1917 | UCCCAUUAUGUCUUGAUCCU | 2394 | UGUGAAGAAAUGAACUUUCC |
| 1918 | CUCCCAUUAUGUCUUGAUCC | 2395 | GUGUGAAGAAAUGAACUUUC |
| 1919 | GCUCCCAUUAUGUCUUGAUC | 2396 | UGUGUGAAGAAAUGAACUUU |
| 1920 | UGCUCCCAUUAUGUCUUGAU | 2397 | UUGUGUGAAGAAAUGAACUU |
| 1921 | AUGCUCCCAUUAUGUCUUGA | 2398 | CUUGUGUGAAGAAAUGAACU |
| 1922 | AAUGCUCCCAUUAUGUCUUG | 2399 | UCUUGUGUGAAGAAAUGAAC |
| 1923 | AAAUGCUCCCAUUAUGUCUU | 2400 | AUCUUGUGUGAAGAAAUGAA |
| 1924 | AAAAUGCUCCCAUUAUGUCU | 2401 | GAUCUUGUGUGAAGAAAUGA |
| 1925 | AAAAAUGCUCCCAUUAUGUC | 2402 | UGAUCUUGUGUGAAGAAAUG |
| 1926 | UAAAAAUGCUCCCAUUAUGU | 2403 | GUGAUCUUGUGUGAAGAAAU |
| 1927 | CUAAAAAUGCUCCCAUUAUG | 2404 | UGUGAUCUUGUGUGAAGAAA |
| 1928 | UCUAAAAAUGCUCCCAUUAU | 2405 | UUGUGAUCUUGUGUGAAGAA |
| 1929 | GUCUAAAAAUGCUCCCAUUA | 2406 | UUUGUGAUCUUGUGUGAAGA |
| 1930 | UGUCUAAAAAUGCUCCCAUU | 2407 | GUUUGUGAUCUUGUGUGAAG |
| 1931 | UUGUCUAAAAAUGCUCCCAU | 2408 | GGUUUGUGAUCUUGUGUGAA |
| 1932 | CUUGUCUAAAAAUGCUCCCA | 2409 | UGGUUUGUGAUCUUGUGUGA |
| 1933 | GCUUGUCUAAAAAUGCUCCC | 2410 | UUGGUUUGUGAUCUUGUGUG |
| 1934 | GGCUUGUCUAAAAAUGCUCC | 2411 | CUUGGUUUGUGAUCUUGUGU |
| 1935 | UGGCUUGUCUAAAAAUGCUC | 2412 | ACUUGGUUUGUGAUCUUGUG |
| 1936 | UUGGCUUGUCUAAAAAUGCU | 2413 | UACUUGGUUUGUGAUCUUGU |
| 1937 | UUUGGCUUGUCUAAAAAUGC | 2414 | UUACUUGGUUUGUGAUCUUG |
| 1938 | CUUUGGCUUGUCUAAAAAUG | 2415 | AUUACUUGGUUUGUGAUCUU |
| 1939 | UCUUUGGCUUGUCUAAAAAU | 2416 | GAUUACUUGGUUUGUGAUCU |
| 1940 | AUCUUUGGCUUGUCUAAAAA | 2417 | GGAUUACUUGGUUUGUGAUC |
| 1941 | CAUCUUUGGCUUGUCUAAAA | 2418 | CGGAUUACUUGGUUUGUGAU |
| 1942 | CCAUCUUUGGCUUGUCUAAA | 2419 | GCGGAUUACUUGGUUUGUGA |
| 1943 | UCCAUCUUUGGCUUGUCUAA | 2420 | AGCGGAUUACUUGGUUUGUG |
| 1944 | UUCCAUCUUUGGCUUGUCUA | 2421 | CAGCGGAUUACUUGGUUUGU |
| 1945 | UUUCCAUCUUUGGCUUGUCU | 2422 | CCAGCGGAUUACUUGGUUUG |
| 1946 | UUUUCCAUCUUUGGCUUGUC | 2423 | UCCAGCGGAUUACUUGGUUU |
| 1947 | CUUUUCCAUCUUUGGCUUGU | 2424 | CUCCAGCGGAUUACUUGGUU |
| 1948 | GCUUUUCCAUCUUUGGCUUG | 2425 | UCUCCAGCGGAUUACUUGGU |
| 1949 | UGCUUUUCCAUCUUUGGCUU | 2426 | UUCUCCAGCGGAUUACUUGG |
| 1950 | AUGCUUUUCCAUCUUUGGCU | 2427 | UUUCUCCAGCGGAUUACUUG |
| 1951 | UAUGCUUUUCCAUCUUUGGC | 2428 | CUUUCUCCAGCGGAUUACUU |
| 1952 | UUAUGCUUUUCCAUCUUUGG | 2429 | UCUUUCUCCAGCGGAUUACU |
| 1953 | AUUAUGCUUUUCCAUCUUUG | 2430 | UUCUUUCUCCAGCGGAUUAC |
| 1954 | CAUUAUGCUUUUCCAUCUUU | 2431 | GUUCUUUCUCCAGCGGAUUA |
| 1955 | GCAUUAUGCUUUUCCAUCUU | 2432 | CGUUCUUUCUCCAGCGGAUU |
| 1956 | GGCAUUAUGCUUUUCCAUCU | 2433 | UCGUUCUUUCUCCAGCGGAU |
| 1957 | GGGCAUUAUGCUUUUCCAUC | 2434 | UUCGUUCUUUCUCCAGCGGA |
| 1958 | UGGGCAUUAUGCUUUUCCAU | 2435 | AUUCGUUCUUUCUCCAGCGG |
| 1959 | CUGGGCAUUAUGCUUUUCCA | 2436 | AAUUCGUUCUUUCUCCAGCG |
| 1960 | CCUGGGCAUUAUGCUUUUCC | 2437 | GAAUUCGUUCUUUCUCCAGC |
| 1961 | CCCUGGGCAUUAUGCUUUUC | 2438 | UGAAUUCGUUCUUUCUCCAG |
| 1962 | CCCCUGGGCAUUAUGCUUUU | 2439 | CUGAAUUCGUUCUUUCUCCA |
| 1963 | GCCCCUGGGCAUUAUGCUUU | 2440 | UCUGAAUUCGUUCUUUCUCC |
| 1964 | UGCCCCUGGGCAUUAUGCUU | 2441 | UUCUGAAUUCGUUCUUUCUC |
| 1965 | CUGCCCCUGGGCAUUAUGCU | 2442 | AUUCUGAAUUCGUUCUUUCU |
| 1966 | CCUGCCCCUGGGCAUUAUGC | 2443 | CAUUCUGAAUUCGUUCUUUC |
| 1967 | CCCUGCCCCUGGGCAUUAUG | 2444 | GCAUUCUGAAUUCGUUCUUU |
| 1968 | ACCCUGCCCCUGGGCAUUAU | 2445 | UGCAUUCUGAAUUCGUUCUU |
| 1969 | UACCCUGCCCCUGGGCAUUA | 2446 | CUGCAUUCUGAAUUCGUUCU |
| 1970 | UUACCCUGCCCCUGGGCAUU | 2447 | CCUGCAUUCUGAAUUCGUUC |
| 1971 | AUUACCCUGCCCCUGGGCAU | 2448 | ACCUGCAUUCUGAAUUCGUU |
| 1972 | CAUUACCCUGCCCCUGGGCA | 2449 | CACCUGCAUUCUGAAUUCGU |
| 1973 | CCAUUACCCUGCCCCUGGGC | 2450 | CCACCUGCAUUCUGAAUUCG |
| 1974 | CCCAUUACCCUGCCCCUGGG | 2451 | GCCACCUGCAUUCUGAAUUC |
| 1975 | ACCCAUUACCCUGCCCCUGG | 2452 | AGCCACCUGCAUUCUGAAUU |
| 1976 | AACCCAUUACCCUGCCCCUG | 2453 | GAGCCACCUGCAUUCUGAAU |
| 1977 | CAACCCAUUACCCUGCCCCU | 2454 | AGAGCCACCUGCAUUCUGAA |
| 1978 | GCAACCCAUUACCCUGCCCC | 2455 | CAGAGCCACCUGCAUUCUGA |
| 1979 | CGCAACCCAUUACCCUGCCC | 2456 | ACAGAGCCACCUGCAUUCUG |
| 1980 | UCGCAACCCAUUACCCUGCC | 2457 | UACAGAGCCACCUGCAUUCU |
| 1981 | AUCGCAACCCAUUACCCUGC | 2458 | UUACAGAGCCACCUGCAUUC |
| 1982 | UAUCGCAACCCAUUACCCUG | 2459 | AUUACAGAGCCACCUGCAUU |
| 1983 | AUAUCGCAACCCAUUACCCU | 2460 | CAUUACAGAGCCACCUGCAU |
| 1984 | CAUAUCGCAACCCAUUACCC | 2461 | UCAUUACAGAGCCACCUGCA |
| 1985 | CCAUAUCGCAACCCAUUACC | 2462 | AUCAUUACAGAGCCACCUGC |
| 1986 | CCCAUAUCGCAACCCAUUAC | 2463 | AAUCAUUACAGAGCCACCUG |
| 1987 | GCCCAUAUCGCAACCCAUUA | 2464 | GAAUCAUUACAGAGCCACCU |
| 1988 | AGCCCAUAUCGCAACCCAUU | 2465 | UGAAUCAUUACAGAGCCACC |
| 1989 | UAGCCCAUAUCGCAACCCAU | 2466 | CUGAAUCAUUACAGAGCCAC |
| 1990 | UUAGCCCAUAUCGCAACCCA | 2467 | GCUGAAUCAUUACAGAGCCA |
| 1991 | CUUAGCCCAUAUCGCAACCC | 2468 | CGCUGAAUCAUUACAGAGCC |
| 1992 | GCUUAGCCCAUAUCGCAACC | 2469 | ACGCUGAAUCAUUACAGAGC |
| 1993 | UGCUUAGCCCAUAUCGCAAC | 2470 | CACGCUGAAUCAUUACAGAG |
| 1994 | CUGCUUAGCCCAUAUCGCAA | 2471 | ACACGCUGAAUCAUUACAGA |
| 1995 | GCUGCUUAGCCCAUAUCGCA | 2472 | CACACGCUGAAUCAUUACAG |
| 1996 | UGCUGCUUAGCCCAUAUCGC | 2473 | UCACACGCUGAAUCAUUACA |
| 1997 | AUGCUGCUUAGCCCAUAUCG | 2474 | UUCACACGCUGAAUCAUUAC |
| 1998 | CAUGCUGCUUAGCCCAUAUC | 2475 | AUUCACACGCUGAAUCAUUA |
| 1999 | GCAUGCUGCUUAGCCCAUAU | 2476 | CAUUCACACGCUGAAUCAUU |
| 2000 | UGCAUGCUGCUUAGCCCAUA | 2477 | CCAUUCACACGCUGAAUCAU |
| 2001 | UUGCAUGCUGCUUAGCCCAU | 2478 | GCCAUUCACACGCUGAAUCA |
| 2002 | CUUGCAUGCUGCUUAGCCCA | 2479 | AGCCAUUCACACGCUGAAUC |
| 2003 | CCUUGCAUGCUGCUUAGCCC | 2480 | GAGCCAUUCACACGCUGAAU |
| 2004 | GCCUUGCAUGCUGCUUAGCC | 2481 | AGAGCCAUUCACACGCUGAA |
| 2005 | AGCCUUGCAUGCUGCUUAGC | 2482 | GAGAGCCAUUCACACGCUGA |
| 2006 | CAGCCUUGCAUGCUGCUUAG | 2483 | AGAGAGCCAUUCACACGCUG |
| 2007 | CCAGCCUUGCAUGCUGCUUA | 2484 | CAGAGAGCCAUUCACACGCU |
| 2008 | GCCAGCCUUGCAUGCUGCUU | 2485 | CCAGAGAGCCAUUCACACGC |
| 2009 | CGCCAGCCUUGCAUGCUGCU | 2486 | GCCAGAGAGCCAUUCACACG |
| 2010 | ACGCCAGCCUUGCAUGCUGC | 2487 | AGCCAGAGAGCCAUUCACAC |
| 2011 | CACGCCAGCCUUGCAUGCUG | 2488 | CAGCCAGAGAGCCAUUCACA |
| 2012 | ACACGCCAGCCUUGCAUGCU | 2489 | ACAGCCAGAGAGCCAUUCAC |
| 2013 | AACACGCCAGCCUUGCAUGC | 2490 | UACAGCCAGAGAGCCAUUCA |
| 2014 | CAACACGCCAGCCUUGCAUG | 2491 | AUACAGCCAGAGAGCCAUUC |
| 2015 | UCAACACGCCAGCCUUGCAU | 2492 | GAUACAGCCAGAGAGCCAUU |
| 2016 | UUCAACACGCCAGCCUUGCA | 2493 | CGAUACAGCCAGAGAGCCAU |
| 2017 | UUUCAACACGCCAGCCUUGC | 2494 | UCGAUACAGCCAGAGAGCCA |
| 2018 | AUUUCAACACGCCAGCCUUG | 2495 | CUCGAUACAGCCAGAGAGCC |
| 2019 | CAUUUCAACACGCCAGCCUU | 2496 | CCUCGAUACAGCCAGAGAGC |
| 2020 | CCAUUUCAACACGCCAGCCU | 2497 | CCCUCGAUACAGCCAGAGAG |
| 2021 | UCCAUUUCAACACGCCAGCC | 2498 | GCCCUCGAUACAGCCAGAGA |
| 2022 | CUCCAUUUCAACACGCCAGC | 2499 | GGCCCUCGAUACAGCCAGAG |
| 2023 | CCUCCAUUUCAACACGCCAG | 2500 | GGGCCCUCGAUACAGCCAGA |
| 2024 | UCCUCCAUUUCAACACGCCA | 2501 | AGGGCCCUCGAUACAGCCAG |
| 2025 | AUCCUCCAUUUCAACACGCC | 2502 | AAGGGCCCUCGAUACAGCCA |
| 2026 | CAUCCUCCAUUUCAACACGC | 2503 | CAAGGGCCCUCGAUACAGCC |
| 2027 | GCAUCCUCCAUUUCAACACG | 2504 | CCAAGGGCCCUCGAUACAGC |
| 2028 | UGCAUCCUCCAUUUCAACAC | 2505 | CCCAAGGGCCCUCGAUACAG |
| 2029 | GUGCAUCCUCCAUUUCAACA | 2506 | CCCCAAGGGCCCUCGAUACA |
| 2030 | UGUGCAUCCUCCAUUUCAAC | 2507 | UCCCCAAGGGCCCUCGAUAC |
| 2031 | AUGUGCAUCCUCCAUUUCAA | 2508 | AUCCCCAAGGGCCCUCGAUA |
| 2032 | UAUGUGCAUCCUCCAUUUCA | 2509 | AAUCCCCAAGGGCCCUCGAU |
| 2033 | GUAUGUGCAUCCUCCAUUUC | 2510 | AAAUCCCCAAGGGCCCUCGA |
| 2034 | CGUAUGUGCAUCCUCCAUUU | 2511 | AAAAUCCCCAAGGGCCCUCG |
| 2035 | CCGUAUGUGCAUCCUCCAUU | 2512 | CAAAAUCCCCAAGGGCCCUC |
| 2036 | GCCGUAUGUGCAUCCUCCAU | 2513 | UCAAAAUCCCCAAGGGCCCU |
| 2037 | AGCCGUAUGUGCAUCCUCCA | 2514 | AUCAAAAUCCCCAAGGGCCC |
| 2038 | CAGCCGUAUGUGCAUCCUCC | 2515 | AAUCAAAAUCCCCAAGGGCC |
| 2039 | ACAGCCGUAUGUGCAUCCUC | 2516 | UAAUCAAAAUCCCCAAGGGC |
| 2040 | CACAGCCGUAUGUGCAUCCU | 2517 | GUAAUCAAAAUCCCCAAGGG |
| 2041 | UCACAGCCGUAUGUGCAUCC | 2518 | UGUAAUCAAAAUCCCCAAGG |
| 2042 | AUCACAGCCGUAUGUGCAUC | 2519 | UUGUAAUCAAAAUCCCCAAG |
| 2043 | GAUCACAGCCGUAUGUGCAU | 2520 | UUUGUAAUCAAAAUCCCCAA |
| 2044 | CGAUCACAGCCGUAUGUGCA | 2521 | AUUUGUAAUCAAAAUCCCCA |
| 2045 | CCGAUCACAGCCGUAUGUGC | 2522 | CAUUUGUAAUCAAAAUCCCC |
| 2046 | ACCGAUCACAGCCGUAUGUG | 2523 | ACAUUUGUAAUCAAAAUCCC |
| 2047 | AACCGAUCACAGCCGUAUGU | 2524 | CACAUUUGUAAUCAAAAUCC |
| 2048 | AAACCGAUCACAGCCGUAUG | 2525 | ACACAUUUGUAAUCAAAAUC |
| 2049 | CAAACCGAUCACAGCCGUAU | 2526 | GACACAUUUGUAAUCAAAAU |
| 2050 | GCAAACCGAUCACAGCCGUA | 2527 | GGACACAUUUGUAAUCAAAA |
| 2051 | GGCAAACCGAUCACAGCCGU | 2528 | UGGACACAUUUGUAAUCAAA |
| 2052 | UGGCAAACCGAUCACAGCCG | 2529 | AUGGACACAUUUGUAAUCAA |
| 2053 | UUGGCAAACCGAUCACAGCC | 2530 | CAUGGACACAUUUGUAAUCA |
| 2054 | CUUGGCAAACCGAUCACAGC | 2531 | CCAUGGACACAUUUGUAAUC |
| 2055 | ACUUGGCAAACCGAUCACAG | 2532 | UCCAUGGACACAUUUGUAAU |
| 2056 | CACUUGGCAAACCGAUCACA | 2533 | UUCCAUGGACACAUUUGUAA |
| 2057 | CCACUUGGCAAACCGAUCAC | 2534 | UUUCCAUGGACACAUUUGUA |
| 2058 | UCCACUUGGCAAACCGAUCA | 2535 | UUUUCCAUGGACACAUUUGU |
| 2059 | GUCCACUUGGCAAACCGAUC | 2536 | CUUUUCCAUGGACACAUUUG |
| 2060 | AGUCCACUUGGCAAACCGAU | 2537 | CCUUUUCCAUGGACACAUUU |
| 2061 | AAGUCCACUUGGCAAACCGA | 2538 | ACCUUUUCCAUGGACACAUU |
| 2062 | CAAGUCCACUUGGCAAACCG | 2539 | GACCUUUUCCAUGGACACAU |
| 2063 | UCAAGUCCACUUGGCAAACC | 2540 | GGACCUUUUCCAUGGACACA |
| 2064 | UUCAAGUCCACUUGGCAAAC | 2541 | AGGACCUUUUCCAUGGACAC |
| 2065 | AUUCAAGUCCACUUGGCAAA | 2542 | UAGGACCUUUUCCAUGGACA |
| 2066 | GAUUCAAGUCCACUUGGCAA | 2543 | GUAGGACCUUUUCCAUGGAC |
| 2067 | CGAUUCAAGUCCACUUGGCA | 2544 | AGUAGGACCUUUUCCAUGGA |
| 2068 | ACGAUUCAAGUCCACUUGGC | 2545 | CAGUAGGACCUUUUCCAUGG |
| 2069 | CACGAUUCAAGUCCACUUGG | 2546 | UCAGUAGGACCUUUUCCAUG |
| 2070 | CCACGAUUCAAGUCCACUUG | 2547 | CUCAGUAGGACCUUUUCCAU |
| 2071 | ACCACGAUUCAAGUCCACUU | 2548 | GCUCAGUAGGACCUUUUCCA |
| 2072 | GACCACGAUUCAAGUCCACU | 2549 | UGCUCAGUAGGACCUUUUCC |
| 2073 | UGACCACGAUUCAAGUCCAC | 2550 | CUGCUCAGUAGGACCUUUUC |
| 2074 | AUGACCACGAUUCAAGUCCA | 2551 | GCUGCUCAGUAGGACCUUUU |
| 2075 | AAUGACCACGAUUCAAGUCC | 2552 | AGCUGCUCAGUAGGACCUUU |
| 2076 | GAAUGACCACGAUUCAAGUC | 2553 | AAGCUGCUCAGUAGGACCUU |
| 2077 | AGAAUGACCACGAUUCAAGU | 2554 | CAAGCUGCUCAGUAGGACCU |
| 2078 | AAGAAUGACCACGAUUCAAG | 2555 | ACAAGCUGCUCAGUAGGACC |
| 2079 | AAAGAAUGACCACGAUUCAA | 2556 | GACAAGCUGCUCAGUAGGAC |
| 2080 | CAAAGAAUGACCACGAUUCA | 2557 | AGACAAGCUGCUCAGUAGGA |
| 2081 | GCAAAGAAUGACCACGAUUC | 2558 | GAGACAAGCUGCUCAGUAGG |
| 2082 | AGCAAAGAAUGACCACGAUU | 2559 | UGAGACAAGCUGCUCAGUAG |
| 2083 | CAGCAAAGAAUGACCACGAU | 2560 | GUGAGACAAGCUGCUCAGUA |
| 2084 | ACAGCAAAGAAUGACCACGA | 2561 | GGUGAGACAAGCUGCUCAGU |
| 2085 | CACAGCAAAGAAUGACCACG | 2562 | UGGUGAGACAAGCUGCUCAG |
| 2086 | ACACAGCAAAGAAUGACCAC | 2563 | CUGGUGAGACAAGCUGCUCA |
| 2087 | UACACAGCAAAGAAUGACCA | 2564 | UCUGGUGAGACAAGCUGCUC |
| 2088 | AUACACAGCAAAGAAUGACC | 2565 | CUCUGGUGAGACAAGCUGCU |
| 2089 | CAUACACAGCAAAGAAUGAC | 2566 | GCUCUGGUGAGACAAGCUGC |
| 2090 | UCAUACACAGCAAAGAAUGA | 2567 | GGCUCUGGUGAGACAAGCUG |
| 2091 | AUCAUACACAGCAAAGAAUG | 2568 | AGGCUCUGGUGAGACAAGCU |
| 2092 | CAUCAUACACAGCAAAGAAU | 2569 | CAGGCUCUGGUGAGACAAGC |
| 2093 | CCAUCAUACACAGCAAAGAA | 2570 | UCAGGCUCUGGUGAGACAAG |
| 2094 | CCCAUCAUACACAGCAAAGA | 2571 | UUCAGGCUCUGGUGAGACAA |
| 2095 | GCCCAUCAUACACAGCAAAG | 2572 | CUUCAGGCUCUGGUGAGACA |
| 2096 | UGCCCAUCAUACACAGCAAA | 2573 | ACUUCAGGCUCUGGUGAGAC |
| 2097 | AUGCCCAUCAUACACAGCAA | 2574 | GACUUCAGGCUCUGGUGAGA |
| 2098 | CAUGCCCAUCAUACACAGCA | 2575 | GGACUUCAGGCUCUGGUGAG |
| 2099 | GCAUGCCCAUCAUACACAGC | 2576 | UGGACUUCAGGCUCUGGUGA |
| 2100 | AGCAUGCCCAUCAUACACAG | 2577 | AUGGACUUCAGGCUCUGGUG |
| 2101 | CAGCAUGCCCAUCAUACACA | 2578 | CAUGGACUUCAGGCUCUGGU |
| 2102 | CCAGCAUGCCCAUCAUACAC | 2579 | UCAUGGACUUCAGGCUCUGG |
| 2103 | ACCAGCAUGCCCAUCAUACA | 2580 | AUCAUGGACUUCAGGCUCUG |
| 2104 | AACCAGCAUGCCCAUCAUAC | 2581 | UAUCAUGGACUUCAGGCUCU |
| 2105 | GAACCAGCAUGCCCAUCAUA | 2582 | AUAUCAUGGACUUCAGGCUC |
| 2106 | AGAACCAGCAUGCCCAUCAU | 2583 | AAUAUCAUGGACUUCAGGCU |
| 2107 | GAGAACCAGCAUGCCCAUCA | 2584 | CAAUAUCAUGGACUUCAGGC |
| 2108 | UGAGAACCAGCAUGCCCAUC | 2585 | UCAAUAUCAUGGACUUCAGG |
| 2109 | CUGAGAACCAGCAUGCCCAU | 2586 | UUCAAUAUCAUGGACUUCAG |
| 2110 | CCUGAGAACCAGCAUGCCCA | 2587 | UUUCAAUAUCAUGGACUUCA |
| 2111 | ACCUGAGAACCAGCAUGCCC | 2588 | CUUUCAAUAUCAUGGACUUC |
| 2112 | AACCUGAGAACCAGCAUGCC | 2589 | UCUUUCAAUAUCAUGGACUU |
| 2113 | CAACCUGAGAACCAGCAUGC | 2590 | AUCUUUCAAUAUCAUGGACU |
| 2114 | GCAACCUGAGAACCAGCAUG | 2591 | GAUCUUUCAAUAUCAUGGAC |
| 2115 | GGCAACCUGAGAACCAGCAU | 2592 | AGAUCUUUCAAUAUCAUGGA |
| 2116 | UGGCAACCUGAGAACCAGCA | 2593 | CAGAUCUUUCAAUAUCAUGG |
| 2117 | UUGGCAACCUGAGAACCAGC | 2594 | UCAGAUCUUUCAAUAUCAUG |
| 2118 | UUUGGCAACCUGAGAACCAG | 2595 | UUCAGAUCUUUCAAUAUCAU |
| 2119 | AUUUGGCAACCUGAGAACCA | 2596 | CUUCAGAUCUUUCAAUAUCA |
| 2120 | UAUUUGGCAACCUGAGAACC | 2597 | UCUUCAGAUCUUUCAAUAUC |
| 2121 | GUAUUUGGCAACCUGAGAAC | 2598 | UUCUUCAGAUCUUUCAAUAU |
| 2122 | AGUAUUUGGCAACCUGAGAA | 2599 | CUUCUUCAGAUCUUUCAAUA |
| 2123 | CAGUAUUUGGCAACCUGAGA | 2600 | UCUUCUUCAGAUCUUUCAAU |
| 2124 | GCAGUAUUUGGCAACCUGAG | 2601 | AUCUUCUUCAGAUCUUUCAA |
| 2125 | AGCAGUAUUUGGCAACCUGA | 2602 | CAUCUUCUUCAGAUCUUUCA |
| 2126 | CAGCAGUAUUUGGCAACCUG | 2603 | UCAUCUUCUUCAGAUCUUUC |
| 2127 | ACAGCAGUAUUUGGCAACCU | 2604 | AUCAUCUUCUUCAGAUCUUU |
| 2128 | CACAGCAGUAUUUGGCAACC | 2605 | GAUCAUCUUCUUCAGAUCUU |
| 2129 | UCACAGCAGUAUUUGGCAAC | 2606 | UGAUCAUCUUCUUCAGAUCU |
| 2130 | CUCACAGCAGUAUUUGGCAA | 2607 | CUGAUCAUCUUCUUCAGAUC |
| 2131 | GCUCACAGCAGUAUUUGGCA | 2608 | ACUGAUCAUCUUCUUCAGAU |
| 2132 | UGCUCACAGCAGUAUUUGGC | 2609 | AACUGAUCAUCUUCUUCAGA |
| 2133 | AUGCUCACAGCAGUAUUUGG | 2610 | GAACUGAUCAUCUUCUUCAG |
| 2134 | AAUGCUCACAGCAGUAUUUG | 2611 | UGAACUGAUCAUCUUCUUCA |
| 2135 | AAAUGCUCACAGCAGUAUUU | 2612 | AUGAACUGAUCAUCUUCUUC |
| 2136 | CAAAUGCUCACAGCAGUAUU | 2613 | AAUGAACUGAUCAUCUUCUU |
| 2137 | ACAAAUGCUCACAGCAGUAU | 2614 | UAAUGAACUGAUCAUCUUCU |
| 2138 | AACAAAUGCUCACAGCAGUA | 2615 | AUAAUGAACUGAUCAUCUUC |
| 2139 | UAACAAAUGCUCACAGCAGU | 2616 | GAUAAUGAACUGAUCAUCUU |
| 2140 | CUAACAAAUGCUCACAGCAG | 2617 | GGAUAAUGAACUGAUCAUCU |
| 2141 | UCUAACAAAUGCUCACAGCA | 2618 | AGGAUAAUGAACUGAUCAUC |
| 2142 | AUCUAACAAAUGCUCACAGC | 2619 | AAGGAUAAUGAACUGAUCAU |
| 2143 | GAUCUAACAAAUGCUCACAG | 2620 | CAAGGAUAAUGAACUGAUCA |
| 2144 | UGAUCUAACAAAUGCUCACA | 2621 | GCAAGGAUAAUGAACUGAUC |
| 2145 | GUGAUCUAACAAAUGCUCAC | 2622 | UGCAAGGAUAAUGAACUGAU |
| 2146 | UGUGAUCUAACAAAUGCUCA | 2623 | AUGCAAGGAUAAUGAACUGA |
| 2147 | AUGUGAUCUAACAAAUGCUC | 2624 | CAUGCAAGGAUAAUGAACUG |
| 2148 | GAUGUGAUCUAACAAAUGCU | 2625 | ACAUGCAAGGAUAAUGAACU |
| 2149 | UGAUGUGAUCUAACAAAUGC | 2626 | CACAUGCAAGGAUAAUGAAC |
| 2150 | GUGAUGUGAUCUAACAAAUG | 2627 | UCACAUGCAAGGAUAAUGAA |
| 2151 | GGUGAUGUGAUCUAACAAAU | 2628 | AUCACAUGCAAGGAUAAUGA |
| 2152 | UGGUGAUGUGAUCUAACAAA | 2629 | CAUCACAUGCAAGGAUAAUG |
| 2153 | UUGGUGAUGUGAUCUAACAA | 2630 | CCAUCACAUGCAAGGAUAAU |
| 2154 | AUUGGUGAUGUGAUCUAACA | 2631 | ACCAUCACAUGCAAGGAUAA |
| 2155 | UAUUGGUGAUGUGAUCUAAC | 2632 | UACCAUCACAUGCAAGGAUA |
| 2156 | UUAUUGGUGAUGUGAUCUAA | 2633 | AUACCAUCACAUGCAAGGAU |
| 2157 | GUUAUUGGUGAUGUGAUCUA | 2634 | GAUACCAUCACAUGCAAGGA |
| 2158 | GGUUAUUGGUGAUGUGAUCU | 2635 | AGAUACCAUCACAUGCAAGG |
| 2159 | UGGUUAUUGGUGAUGUGAUC | 2636 | CAGAUACCAUCACAUGCAAG |
| 2160 | CUGGUUAUUGGUGAUGUGAU | 2637 | CCAGAUACCAUCACAUGCAA |
| 2161 | CCUGGUUAUUGGUGAUGUGA | 2638 | CCCAGAUACCAUCACAUGCA |
| 2162 | UCCUGGUUAUUGGUGAUGUG | 2639 | UCCCAGAUACCAUCACAUGC |
| 2163 | AUCCUGGUUAUUGGUGAUGU | 2640 | AUCCCAGAUACCAUCACAUG |
| 2164 | AAUCCUGGUUAUUGGUGAUG | 2641 | CAUCCCAGAUACCAUCACAU |
| 2165 | AAAUCCUGGUUAUUGGUGAU | 2642 | ACAUCCCAGAUACCAUCACA |
| 2166 | AAAAUCCUGGUUAUUGGUGA | 2643 | AACAUCCCAGAUACCAUCAC |
| 2167 | UAAAAUCCUGGUUAUUGGUG | 2644 | UAACAUCCCAGAUACCAUCA |
| 2168 | UUAAAAUCCUGGUUAUUGGU | 2645 | AUAACAUCCCAGAUACCAUC |
| 2169 | UUUAAAAUCCUGGUUAUUGG | 2646 | CAUAACAUCCCAGAUACCAU |
| 2170 | CUUUAAAAUCCUGGUUAUUG | 2647 | CCAUAACAUCCCAGAUACCA |
| 2171 | CCUUUAAAAUCCUGGUUAUU | 2648 | CCCAUAACAUCCCAGAUACC |
| 2172 | CCCUUUAAAAUCCUGGUUAU | 2649 | UCCCAUAACAUCCCAGAUAC |
| 2173 | ACCCUUUAAAAUCCUGGUUA | 2650 | UUCCCAUAACAUCCCAGAUA |
| 2174 | GACCCUUUAAAAUCCUGGUU | 2651 | UUUCCCAUAACAUCCCAGAU |
| 2175 | AGACCCUUUAAAAUCCUGGU | 2652 | AUUUCCCAUAACAUCCCAGA |
| 2176 | CAGACCCUUUAAAAUCCUGG | 2653 | CAUUUCCCAUAACAUCCCAG |
| 2177 | GCAGACCCUUUAAAAUCCUG | 2654 | UCAUUUCCCAUAACAUCCCA |
| 2178 | UGCAGACCCUUUAAAAUCCU | 2655 | UUCAUUUCCCAUAACAUCCC |
| 2179 | CUGCAGACCCUUUAAAAUCC | 2656 | CUUCAUUUCCCAUAACAUCC |
| 2180 | CCUGCAGACCCUUUAAAAUC | 2657 | UCUUCAUUUCCCAUAACAUC |
| 2181 | UCCUGCAGACCCUUUAAAAU | 2658 | CUCUUCAUUUCCCAUAACAU |
| 2182 | CUCCUGCAGACCCUUUAAAA | 2659 | GCUCUUCAUUUCCCAUAACA |
| 2183 | GCUCCUGCAGACCCUUUAAA | 2660 | AGCUCUUCAUUUCCCAUAAC |
| 2184 | UGCUCCUGCAGACCCUUUAA | 2661 | GAGCUCUUCAUUUCCCAUAA |
| 2185 | GUGCUCCUGCAGACCCUUUA | 2662 | AGAGCUCUUCAUUUCCCAUA |
| 2186 | GGUGCUCCUGCAGACCCUUU | 2663 | CAGAGCUCUUCAUUUCCCAU |
| 2187 | AGGUGCUCCUGCAGACCCUU | 2664 | ACAGAGCUCUUCAUUUCCCA |
| 2188 | AAGGUGCUCCUGCAGACCCU | 2665 | CACAGAGCUCUUCAUUUCCC |
| 2189 | GAAGGUGCUCCUGCAGACCC | 2666 | UCACAGAGCUCUUCAUUUCC |
| 2190 | AGAAGGUGCUCCUGCAGACC | 2667 | AUCACAGAGCUCUUCAUUUC |
| 2191 | CAGAAGGUGCUCCUGCAGAC | 2668 | AAUCACAGAGCUCUUCAUUU |
| 2192 | ACAGAAGGUGCUCCUGCAGA | 2669 | AAAUCACAGAGCUCUUCAUU |
| 2193 | CACAGAAGGUGCUCCUGCAG | 2670 | AAAAUCACAGAGCUCUUCAU |
| 2194 | CCACAGAAGGUGCUCCUGCA | 2671 | CAAAAUCACAGAGCUCUUCA |
| 2195 | UCCACAGAAGGUGCUCCUGC | 2672 | ACAAAAUCACAGAGCUCUUC |
| 2196 | UUCCACAGAAGGUGCUCCUG | 2673 | UACAAAAUCACAGAGCUCUU |
| 2197 | UUUCCACAGAAGGUGCUCCU | 2674 | UUACAAAAUCACAGAGCUCU |
| 2198 | UUUUCCACAGAAGGUGCUCC | 2675 | CUUACAAAAUCACAGAGCUC |
| 2199 | AUUUUCCACAGAAGGUGCUC | 2676 | UCUUACAAAAUCACAGAGCU |
| 2200 | CAUUUUCCACAGAAGGUGCU | 2677 | AUCUUACAAAAUCACAGAGC |
| 2201 | ACAUUUUCCACAGAAGGUGC | 2678 | GAUCUUACAAAAUCACAGAG |
| 2202 | UACAUUUUCCACAGAAGGUG | 2679 | GGAUCUUACAAAAUCACAGA |
| 2203 | UUACAUUUUCCACAGAAGGU | 2680 | UGGAUCUUACAAAAUCACAG |
| 2204 | UUUACAUUUUCCACAGAAGG | 2681 | CUGGAUCUUACAAAAUCACA |
| 2205 | CUUUACAUUUUCCACAGAAG | 2682 | UCUGGAUCUUACAAAAUCAC |
| 2206 | UCUUUACAUUUUCCACAGAA | 2683 | GUCUGGAUCUUACAAAAUCA |
| 2207 | UUCUUUACAUUUUCCACAGA | 2684 | AGUCUGGAUCUUACAAAAUC |
| 2208 | AUUCUUUACAUUUUCCACAG | 2685 | AAGUCUGGAUCUUACAAAAU |
| 2209 | CAUUCUUUACAUUUUCCACA | 2686 | CAAGUCUGGAUCUUACAAAA |
| 2210 | CCAUUCUUUACAUUUUCCAC | 2687 | UCAAGUCUGGAUCUUACAAA |
| 2211 | UCCAUUCUUUACAUUUUCCA | 2688 | UUCAAGUCUGGAUCUUACAA |
| 2212 | UUCCAUUCUUUACAUUUUCC | 2689 | CUUCAAGUCUGGAUCUUACA |
| 2213 | AUUCCAUUCUUUACAUUUUC | 2690 | ACUUCAAGUCUGGAUCUUAC |
| 2214 | GAUUCCAUUCUUUACAUUUU | 2691 | GACUUCAAGUCUGGAUCUUA |
| 2215 | UGAUUCCAUUCUUUACAUUU | 2692 | UGACUUCAAGUCUGGAUCUU |
| 2216 | CUGAUUCCAUUCUUUACAUU | 2693 | GUGACUUCAAGUCUGGAUCU |
| 2217 | UCUGAUUCCAUUCUUUACAU | 2694 | AGUGACUUCAAGUCUGGAUC |
| 2218 | UUCUGAUUCCAUUCUUUACA | 2695 | CAGUGACUUCAAGUCUGGAU |
| 2219 | GUUCUGAUUCCAUUCUUUAC | 2696 | UCAGUGACUUCAAGUCUGGA |
| 2220 | UGUUCUGAUUCCAUUCUUUA | 2697 | AUCAGUGACUUCAAGUCUGG |
| 2221 | CUGUUCUGAUUCCAUUCUUU | 2698 | CAUCAGUGACUUCAAGUCUG |
| 2222 | CCUGUUCUGAUUCCAUUCUU | 2699 | UCAUCAGUGACUUCAAGUCU |
| 2223 | ACCUGUUCUGAUUCCAUUCU | 2700 | GUCAUCAGUGACUUCAAGUC |
| 2224 | AACCUGUUCUGAUUCCAUUC | 2701 | GGUCAUCAGUGACUUCAAGU |
| 2225 | AAACCUGUUCUGAUUCCAUU | 2702 | AGGUCAUCAGUGACUUCAAG |
| 2226 | AAAACCUGUUCUGAUUCCAU | 2703 | AAGGUCAUCAGUGACUUCAA |
| 2227 | GAAAACCUGUUCUGAUUCCA | 2704 | CAAGGUCAUCAGUGACUUCA |
| 2228 | AGAAAACCUGUUCUGAUUCC | 2705 | UCAAGGUCAUCAGUGACUUC |
| 2229 | CAGAAAACCUGUUCUGAUUC | 2706 | CUCAAGGUCAUCAGUGACUU |
| 2230 | CCAGAAAACCUGUUCUGAUU | 2707 | UCUCAAGGUCAUCAGUGACU |
| 2231 | UCCAGAAAACCUGUUCUGAU | 2708 | UUCUCAAGGUCAUCAGUGAC |
| 2232 | CUCCAGAAAACCUGUUCUGA | 2709 | UUUCUCAAGGUCAUCAGUGA |
| 2233 | UCUCCAGAAAACCUGUUCUG | 2710 | CUUUCUCAAGGUCAUCAGUG |
| 2234 | AUCUCCAGAAAACCUGUUCU | 2711 | ACUUUCUCAAGGUCAUCAGU |
| 2235 | AAUCUCCAGAAAACCUGUUC | 2712 | AACUUUCUCAAGGUCAUCAG |
| 2236 | CAAUCUCCAGAAAACCUGUU | 2713 | AAACUUUCUCAAGGUCAUCA |
| 2237 | UCAAUCUCCAGAAAACCUGU | 2714 | CAAACUUUCUCAAGGUCAUC |
| 2238 | AUCAAUCUCCAGAAAACCUG | 2715 | GCAAACUUUCUCAAGGUCAU |
| 2239 | CAUCAAUCUCCAGAAAACCU | 2716 | UGCAAACUUUCUCAAGGUCA |
| 2240 | UCAUCAAUCUCCAGAAAACC | 2717 | UUGCAAACUUUCUCAAGGUC |
| 2241 | UUCAUCAAUCUCCAGAAAAC | 2718 | AUUGCAAACUUUCUCAAGGU |
| 2242 | GUUCAUCAAUCUCCAGAAAA | 2719 | CAUUGCAAACUUUCUCAAGG |
| 2243 | UGUUCAUCAAUCUCCAGAAA | 2720 | UCAUUGCAAACUUUCUCAAG |
| 2244 | GUGUUCAUCAAUCUCCAGAA | 2721 | UUCAUUGCAAACUUUCUCAA |
| 2245 | UGUGUUCAUCAAUCUCCAGA | 2722 | CUUCAUUGCAAACUUUCUCA |
| 2246 | AUGUGUUCAUCAAUCUCCAG | 2723 | ACUUCAUUGCAAACUUUCUC |
| 2247 | CAUGUGUUCAUCAAUCUCCA | 2724 | UACUUCAUUGCAAACUUUCU |
| 2248 | UCAUGUGUUCAUCAAUCUCC | 2725 | CUACUUCAUUGCAAACUUUC |
| 2249 | CUCAUGUGUUCAUCAAUCUC | 2726 | ACUACUUCAUUGCAAACUUU |
| 2250 | UCUCAUGUGUUCAUCAAUCU | 2727 | GACUACUUCAUUGCAAACUU |
| 2251 | CUCUCAUGUGUUCAUCAAUC | 2728 | CGACUACUUCAUUGCAAACU |
| 2252 | ACUCUCAUGUGUUCAUCAAU | 2729 | UCGACUACUUCAUUGCAAAC |
| 2253 | AACUCUCAUGUGUUCAUCAA | 2730 | GUCGACUACUUCAUUGCAAA |
| 2254 | UAACUCUCAUGUGUUCAUCA | 2731 | UGUCGACUACUUCAUUGCAA |
| 2255 | AUAACUCUCAUGUGUUCAUC | 2732 | GUGUCGACUACUUCAUUGCA |
| 2256 | CAUAACUCUCAUGUGUUCAU | 2733 | GGUGUCGACUACUUCAUUGC |
| 2257 | ACAUAACUCUCAUGUGUUCA | 2734 | AGGUGUCGACUACUUCAUUG |
| 2258 | GACAUAACUCUCAUGUGUUC | 2735 | CAGGUGUCGACUACUUCAUU |
| 2259 | UGACAUAACUCUCAUGUGUU | 2736 | ACAGGUGUCGACUACUUCAU |
| 2260 | CUGACAUAACUCUCAUGUGU | 2737 | AACAGGUGUCGACUACUUCA |
| 2261 | UCUGACAUAACUCUCAUGUG | 2738 | AAACAGGUGUCGACUACUUC |
| 2262 | CUCUGACAUAACUCUCAUGU | 2739 | CAAACAGGUGUCGACUACUU |
| 2263 | UCUCUGACAUAACUCUCAUG | 2740 | ACAAACAGGUGUCGACUACU |
| 2264 | UUCUCUGACAUAACUCUCAU | 2741 | UACAAACAGGUGUCGACUAC |
| 2265 | CUUCUCUGACAUAACUCUCA | 2742 | AUACAAACAGGUGUCGACUA |
| 2266 | UCUUCUCUGACAUAACUCUC | 2743 | UAUACAAACAGGUGUCGACU |
| 2267 | UUCUUCUCUGACAUAACUCU | 2744 | UUAUACAAACAGGUGUCGAC |
| 2268 | UUUCUUCUCUGACAUAACUC | 2745 | CUUAUACAAACAGGUGUCGA |
| 2269 | GUUUCUUCUCUGACAUAACU | 2746 | CCUUAUACAAACAGGUGUCG |
| 2270 | UGUUUCUUCUCUGACAUAAC | 2747 | CCCUUAUACAAACAGGUGUC |
| 2271 | AUGUUUCUUCUCUGACAUAA | 2748 | UCCCUUAUACAAACAGGUGU |
| 2272 | CAUGUUUCUUCUCUGACAUA | 2749 | UUCCCUUAUACAAACAGGUG |
| 2273 | CCAUGUUUCUUCUCUGACAU | 2750 | CUUCCCUUAUACAAACAGGU |
| 2274 | ACCAUGUUUCUUCUCUGACA | 2751 | ACUUCCCUUAUACAAACAGG |
| 2275 | CACCAUGUUUCUUCUCUGAC | 2752 | GACUUCCCUUAUACAAACAG |
| 2276 | GCACCAUGUUUCUUCUCUGA | 2753 | CGACUUCCCUUAUACAAACA |
| 2277 | UGCACCAUGUUUCUUCUCUG | 2754 | UCGACUUCCCUUAUACAAAC |
| 2278 | CUGCACCAUGUUUCUUCUCU | 2755 | CUCGACUUCCCUUAUACAAA |
| 2279 | UCUGCACCAUGUUUCUUCUC | 2756 | UCUCGACUUCCCUUAUACAA |
| 2280 | AUCUGCACCAUGUUUCUUCU | 2757 | GUCUCGACUUCCCUUAUACA |
| 2281 | UAUCUGCACCAUGUUUCUUC | 2758 | UGUCUCGACUUCCCUUAUAC |
| 2282 | CUAUCUGCACCAUGUUUCUU | 2759 | UUGUCUCGACUUCCCUUAUA |
| 2283 | UCUAUCUGCACCAUGUUUCU | 2760 | GUUGUCUCGACUUCCCUUAU |
| 2284 | UUCUAUCUGCACCAUGUUUC | 2761 | UGUUGUCUCGACUUCCCUUA |
| 2285 | CUUCUAUCUGCACCAUGUUU | 2762 | AUGUUGUCUCGACUUCCCUU |
| 2286 | ACUUCUAUCUGCACCAUGUU | 2763 | CAUGUUGUCUCGACUUCCCU |
| 2287 | CACUUCUAUCUGCACCAUGU | 2764 | UCAUGUUGUCUCGACUUCCC |
| 2288 | CCACUUCUAUCUGCACCAUG | 2765 | CUCAUGUUGUCUCGACUUCC |
| 2289 | CCCACUUCUAUCUGCACCAU | 2766 | ACUCAUGUUGUCUCGACUUC |
| 2290 | ACCCACUUCUAUCUGCACCA | 2767 | CACUCAUGUUGUCUCGACUU |
| 2291 | GACCCACUUCUAUCUGCACC | 2768 | ACACUCAUGUUGUCUCGACU |
| 2292 | UGACCCACUUCUAUCUGCAC | 2769 | CACACUCAUGUUGUCUCGAC |
| 2293 | UUGACCCACUUCUAUCUGCA | 2770 | UCACACUCAUGUUGUCUCGA |
| 2294 | GUUGACCCACUUCUAUCUGC | 2771 | AUCACACUCAUGUUGUCUCG |
| 2295 | UGUUGACCCACUUCUAUCUG | 2772 | AAUCACACUCAUGUUGUCUC |
| 2296 | CUGUUGACCCACUUCUAUCU | 2773 | AAAUCACACUCAUGUUGUCU |
| 2297 | GCUGUUGACCCACUUCUAUC | 2774 | AAAAUCACACUCAUGUUGUC |
| 2298 | AGCUGUUGACCCACUUCUAU | 2775 | CAAAAUCACACUCAUGUUGU |
| 2299 | CAGCUGUUGACCCACUUCUA | 2776 | UCAAAAUCACACUCAUGUUG |
| 2300 | ACAGCUGUUGACCCACUUCU | 2777 | AUCAAAAUCACACUCAUGUU |
| 2301 | UACAGCUGUUGACCCACUUC | 2778 | GAUCAAAAUCACACUCAUGU |
| 2302 | CUACAGCUGUUGACCCACUU | 2779 | AGAUCAAAAUCACACUCAUG |
| 2303 | CCUACAGCUGUUGACCCACU | 2780 | CAGAUCAAAAUCACACUCAU |
| 2304 | ACCUACAGCUGUUGACCCAC | 2781 | ACAGAUCAAAAUCACACUCA |
| 2305 | CACCUACAGCUGUUGACCCA | 2782 | AACAGAUCAAAAUCACACUC |
| 2306 | ACACCUACAGCUGUUGACCC | 2783 | AAACAGAUCAAAAUCACACU |
| 2307 | GACACCUACAGCUGUUGACC | 2784 | AAAACAGAUCAAAAUCACAC |
| 2308 | AGACACCUACAGCUGUUGAC | 2785 | GAAAACAGAUCAAAAUCACA |
| 2309 | AAGACACCUACAGCUGUUGA | 2786 | GGAAAACAGAUCAAAAUCAC |
| 2310 | UAAGACACCUACAGCUGUUG | 2787 | UGGAAAACAGAUCAAAAUCA |
| 2311 | UUAAGACACCUACAGCUGUU | 2788 | UUGGAAAACAGAUCAAAAUC |
| 2312 | AUUAAGACACCUACAGCUGU | 2789 | UUUGGAAAACAGAUCAAAAU |
| 2313 | AAUUAAGACACCUACAGCUG | 2790 | AUUUGGAAAACAGAUCAAAA |
| 2314 | AAAUUAAGACACCUACAGCU | 2791 | CAUUUGGAAAACAGAUCAAA |
| 2315 | GAAAUUAAGACACCUACAGC | 2792 | GCAUUUGGAAAACAGAUCAA |
| 2316 | AGAAAUUAAGACACCUACAG | 2793 | UGCAUUUGGAAAACAGAUCA |
| 2317 | GAGAAAUUAAGACACCUACA | 2794 | GUGCAUUUGGAAAACAGAUC |
| 2318 | GGAGAAAUUAAGACACCUAC | 2795 | GGUGCAUUUGGAAAACAGAU |
| 2319 | GGGAGAAAUUAAGACACCUA | 2796 | GGGUGCAUUUGGAAAACAGA |
| 2320 | GGGGAGAAAUUAAGACACCU | 2797 | UGGGUGCAUUUGGAAAACAG |
| 2321 | UGGGGAGAAAUUAAGACACC | 2798 | UUGGGUGCAUUUGGAAAACA |
| 2322 | UUGGGGAGAAAUUAAGACAC | 2799 | UUUGGGUGCAUUUGGAAAAC |
| 2323 | GUUGGGGAGAAAUUAAGACA | 2800 | CUUUGGGUGCAUUUGGAAAA |
| 2324 | UGUUGGGGAGAAAUUAAGAC | 2801 | ACUUUGGGUGCAUUUGGAAA |
| 2325 | AUGUUGGGGAGAAAUUAAGA | 2802 | UACUUUGGGUGCAUUUGGAA |
| 2326 | UAUGUUGGGGAGAAAUUAAG | 2803 | AUACUUUGGGUGCAUUUGGA |
| 2327 | GUAUGUUGGGGAGAAAUUAA | 2804 | GAUACUUUGGGUGCAUUUGG |
| 2328 | AGUAUGUUGGGGAGAAAUUA | 2805 | CGAUACUUUGGGUGCAUUUG |
| 2329 | AAGUAUGUUGGGGAGAAAUU | 2806 | GCGAUACUUUGGGUGCAUUU |
| 2330 | UAAGUAUGUUGGGGAGAAAU | 2807 | GGCGAUACUUUGGGUGCAUU |
| 2331 | AUAAGUAUGUUGGGGAGAAA | 2808 | UGGCGAUACUUUGGGUGCAU |
| 2332 | AAUAAGUAUGUUGGGGAGAA | 2809 | CUGGCGAUACUUUGGGUGCA |
| 2333 | AAAUAAGUAUGUUGGGGAGA | 2810 | UCUGGCGAUACUUUGGGUGC |
| 2334 | GAAAUAAGUAUGUUGGGGAG | 2811 | UUCUGGCGAUACUUUGGGUG |
| 2335 | UGAAAUAAGUAUGUUGGGGA | 2812 | CUUCUGGCGAUACUUUGGGU |
| 2336 | AUGAAAUAAGUAUGUUGGGG | 2813 | GCUUCUGGCGAUACUUUGGG |
| 2337 | AAUGAAAUAAGUAUGUUGGG | 2814 | UGCUUCUGGCGAUACUUUGG |
| 2338 | UAAUGAAAUAAGUAUGUUGG | 2815 | CUGCUUCUGGCGAUACUUUG |
| 2339 | UUAAUGAAAUAAGUAUGUUG | 2816 | ACUGCUUCUGGCGAUACUUU |
| 2340 | GUUAAUGAAAUAAGUAUGUU | 2817 | CACUGCUUCUGGCGAUACUU |
| 2341 | AGUUAAUGAAAUAAGUAUGU | 2818 | UCACUGCUUCUGGCGAUACU |
| 2342 | CAGUUAAUGAAAUAAGUAUG | 2819 | UUCACUGCUUCUGGCGAUAC |
| 2343 | ACAGUUAAUGAAAUAAGUAU | 2820 | CUUCACUGCUUCUGGCGAUA |
| 2344 | CACAGUUAAUGAAAUAAGUA | 2821 | UCUUCACUGCUUCUGGCGAU |
| 2345 | CCACAGUUAAUGAAAUAAGU | 2822 | UUCUUCACUGCUUCUGGCGA |
| 2346 | UCCACAGUUAAUGAAAUAAG | 2823 | CUUCUUCACUGCUUCUGGCG |
| 2347 | CUCCACAGUUAAUGAAAUAA | 2824 | CCUUCUUCACUGCUUCUGGC |
| 2348 | UCUCCACAGUUAAUGAAAUA | 2825 | UCCUUCUUCACUGCUUCUGG |
| 2349 | GUCUCCACAGUUAAUGAAAU | 2826 | CUCCUUCUUCACUGCUUCUG |
| 2350 | AGUCUCCACAGUUAAUGAAA | 2827 | CCUCCUUCUUCACUGCUUCU |
| 2351 | GAGUCUCCACAGUUAAUGAA | 2828 | GCCUCCUUCUUCACUGCUUC |
| 2352 | UGAGUCUCCACAGUUAAUGA | 2829 | UGCCUCCUUCUUCACUGCUU |
| 2353 | UUGAGUCUCCACAGUUAAUG | 2830 | CUGCCUCCUUCUUCACUGCU |
| 2354 | CUUGAGUCUCCACAGUUAAU | 2831 | UCUGCCUCCUUCUUCACUGC |
| 2355 | UCUUGAGUCUCCACAGUUAA | 2832 | CUCUGCCUCCUUCUUCACUG |
| 2356 | CUCUUGAGUCUCCACAGUUA | 2833 | ACUCUGCCUCCUUCUUCACU |
| 2357 | CCUCUUGAGUCUCCACAGUU | 2834 | AACUCUGCCUCCUUCUUCAC |
| 2358 | ACCUCUUGAGUCUCCACAGU | 2835 | CAACUCUGCCUCCUUCUUCA |
| 2359 | AACCUCUUGAGUCUCCACAG | 2836 | CCAACUCUGCCUCCUUCUUC |
| 2360 | AAACCUCUUGAGUCUCCACA | 2837 | UCCAACUCUGCCUCCUUCUU |
| 2361 | UAAACCUCUUGAGUCUCCAC | 2838 | GUCCAACUCUGCCUCCUUCU |
| 2362 | GUAAACCUCUUGAGUCUCCA | 2839 | UGUCCAACUCUGCCUCCUUC |
| 2363 | AGUAAACCUCUUGAGUCUCC | 2840 | UUGUCCAACUCUGCCUCCUU |
| 2364 | AAGUAAACCUCUUGAGUCUC | 2841 | CUUGUCCAACUCUGCCUCCU |
| 2365 | AAAGUAAACCUCUUGAGUCU | 2842 | ACUUGUCCAACUCUGCCUCC |
| 2366 | CAAAGUAAACCUCUUGAGUC | 2843 | UACUUGUCCAACUCUGCCUC |
| 2367 | ACAAAGUAAACCUCUUGAGU | 2844 | GUACUUGUCCAACUCUGCCU |
| 2368 | UACAAAGUAAACCUCUUGAG | 2845 | GGUACUUGUCCAACUCUGCC |
| 2369 | CUACAAAGUAAACCUCUUGA | 2846 | AGGUACUUGUCCAACUCUGC |
| 2370 | CCUACAAAGUAAACCUCUUG | 2847 | CAGGUACUUGUCCAACUCUG |
| 2371 | UCCUACAAAGUAAACCUCUU | 2848 | CCAGGUACUUGUCCAACUCU |
| 2372 | UUCCUACAAAGUAAACCUCU | 2849 | UCCAGGUACUUGUCCAACUC |
| 2373 | GUUCCUACAAAGUAAACCUC | 2850 | UUCCAGGUACUUGUCCAACU |
| 2374 | UGUUCCUACAAAGUAAACCU | 2851 | AUUCCAGGUACUUGUCCAAC |
| 2375 | CUGUUCCUACAAAGUAAACC | 2852 | CAUUCCAGGUACUUGUCCAA |
| 2376 | CCUGUUCCUACAAAGUAAAC | 2853 | GCAUUCCAGGUACUUGUCCA |
| 2377 | UCCUGUUCCUACAAAGUAAA | 2854 | UGCAUUCCAGGUACUUGUCC |
| 2378 | UUCCUGUUCCUACAAAGUAA | 2855 | CUGCAUUCCAGGUACUUGUC |
| 2379 | UUUCCUGUUCCUACAAAGUA | 2856 | UCUGCAUUCCAGGUACUUGU |
| 2380 | CUUUCCUGUUCCUACAAAGU | 2857 | CUCUGCAUUCCAGGUACUUG |
| 2381 | ACUUUCCUGUUCCUACAAAG | 2858 | ACUCUGCAUUCCAGGUACUU |
| 2382 | AACUUUCCUGUUCCUACAAA | 2859 | UACUCUGCAUUCCAGGUACU |
| 2383 | GAACUUUCCUGUUCCUACAA | 2860 | CUACUCUGCAUUCCAGGUAC |
| 2384 | UGAACUUUCCUGUUCCUACA | 2861 | UCUACUCUGCAUUCCAGGUA |
| 2385 | AUGAACUUUCCUGUUCCUAC | 2862 | UUCUACUCUGCAUUCCAGGU |
| 2386 | AAUGAACUUUCCUGUUCCUA | 2863 | CUUCUACUCUGCAUUCCAGG |

*At least one nucleoside linkage of the oligonucleotide
is selected from a phosphorothioate linkage, an alkyl
phosphate linkage, an alkylphosphonate linkage, a
3-methoxypropyl phosphonate linkage, a
phosphorodithioate linkage, a phosphotriester linkage,
a methylphosphonate linkage, an aminoalkylphosphotriester
linkage, an alkylene phosphonate linkage, a phosphinate
linkage, a phosphoramidate linkage, a phosphoramidothioate
linkage, a phosphorodiamidate (e.g., comprising a
phosphorodiamidate morpholino (PMO), 3′ amino ribose,
or 5′ amino ribose) linkage, an aminoalkylphosphoramidate
linkage, a thiophosphoramidate linkage, a
thionoalkylphosphonate linkage, a thionoalkylphosphotriester
linkage, a thiophosphate linkage, a selenophosphate
linkage, and a boranophosphate linkage

[0184] Examples of particular PPM1A AONs, or pharmaceutically acceptable salts thereof, described herein include:
[0185] a PPM1A antisense oligonucleotide that includes the nucleotide sequence of SEQ ID NO: 87 (5′ GCTGCTTAGCCCATATCGCA 3′ (QPA-542)), or a pharmaceutically acceptable salt thereof,
[0186] a PPM1A antisense oligonucleotide that includes the nucleotide sequence of SEQ ID NO: 100 (5′ GCCAGCCTTGCATGCTGCTT 3′ (QPA-555)), or a pharmaceutically acceptable salt thereof,
[0187] a PPM1A antisense oligonucleotide that includes the nucleotide sequence of SEQ ID NO: 104 (5′ ACACGCCAGCCTTGCATGCT 3′ (QPA-559)), or a pharmaceutically acceptable salt thereof,
[0188] a PPM1A antisense oligonucleotide that includes the nucleotide sequence of SEQ ID NO: 144 (5′ TGGCAAACCGATCACAGCCG 3′ (QPA-599)), or a pharmaceutically acceptable salt thereof,
[0189] a PPM1A antisense oligonucleotide that includes the nucleotide sequence of SEQ ID NO: 147 (5′ ACTTGGCAAACCGATCACAG 3′ (QPA-602)), or a pharmaceutically acceptable salt thereof,
[0190] a PPM1A antisense oligonucleotide that includes the nucleotide sequence of SEQ ID NO: 148 (5′ CACTTGGCAAACCGATCACA 3′ (QPA-603)), or a pharmaceutically acceptable salt thereof,
[0191] a PPM1A antisense oligonucleotide that includes the nucleotide sequence of SEQ ID NO: 149 (5′ CCACTTGGCAAACCGATCAC 3′ (QPA-604)), or a pharmaceutically acceptable salt thereof,
[0192] a PPM1A antisense oligonucleotide that includes the nucleotide sequence of SEQ ID NO: 150 (5′ TCCACTTGGCAAACCGATCA 3′ (QPA-605)), or a pharmaceutically acceptable salt thereof,
[0193] a PPM1A antisense oligonucleotide that includes the nucleotide sequence of SEQ ID NO: 151 (5′ GTCCACTTGGCAAACCGATC 3′ (QPA-606)), or a pharmaceutically acceptable salt thereof,
[0194] a PPM1A antisense oligonucleotide that includes the nucleotide sequence of SEQ ID NO: 152 (5′ AGTCCACTTGGCAAACCGAT 3′ (QPA-607)), or a pharmaceutically acceptable salt thereof,
[0195] a PPM1A antisense oligonucleotide that includes the nucleotide sequence of SEQ ID NO: 153 (5′ AAGTCCACTTGGCAAACCGA 3′ (QPA-608)), or a pharmaceutically acceptable salt thereof,
[0196] a PPM1A antisense oligonucleotide that includes the nucleotide sequence of SEQ ID NO: 154 (5′ CAAGTCCACTTGGCAAACCG 3′ (QPA-609)), or a pharmaceutically acceptable salt thereof,
[0197] a PPM1A antisense oligonucleotide that includes the nucleotide sequence of SEQ ID NO: 170 (5′ AAGAATGACCACGATTCAAG 3′ (QPA-625)), or a pharmaceutically acceptable salt thereof,
[0198] a PPM1A antisense oligonucleotide that includes the nucleotide sequence of SEQ ID NO: 187 (5′ GCCCATCATACACAGCAAAG 3′ (QPA-642)), or a pharmaceutically acceptable salt thereof,
[0199] a PPM1A antisense oligonucleotide that includes the nucleotide sequence of SEQ ID NO: 189 (5′ ATGCCCATCATACACAGCAA 3′ (QPA-644)), or a pharmaceutically acceptable salt thereof,
[0200] a PPM1A antisense oligonucleotide that includes the nucleotide sequence of SEQ ID NO: 191 (5′ GCATGCCCATCATACACAGC 3′ (QPA-646)), or a pharmaceutically acceptable salt thereof,
[0201] a PPM1A antisense oligonucleotide that includes the nucleotide sequence of SEQ ID NO: 193 (5′ CAGCATGCCCATCATACACA 3′ (QPA-648)), or a pharmaceutically acceptable salt thereof,
[0202] a PPM1A antisense oligonucleotide that includes the nucleotide sequence of SEQ ID NO: 195 (5′ ACCAGCATGCCCATCATACA 3′ (QPA-650)), or a pharmaceutically acceptable salt thereof,
[0203] a PPM1A antisense oligonucleotide that includes the nucleotide sequence of SEQ ID NO: 197 (5′ GAACCAGCATGCCCATCATA 3′ (QPA-652)), or a pharmaceutically acceptable salt thereof,
[0204] a PPM1A antisense oligonucleotide that includes the nucleotide sequence of SEQ ID NO: 200 (5′ TGAGAACCAGCATGCCCATC 3′ (QPA-655)), or a pharmaceutically acceptable salt thereof,
[0205] a PPM1A antisense oligonucleotide that includes the nucleotide sequence of SEQ ID NO: 201 (5′ CTGAGAACCAGCATGCCCAT 3′ (QPA-656)), or a pharmaceutically acceptable salt thereof,
[0206] a PPM1A antisense oligonucleotide that includes the nucleotide sequence of SEQ ID NO: 253 (5′ CCTGGTTATTGGTGATGTGA 3′ (QPA-708)), or a pharmaceutically acceptable salt thereof,
[0207] a PPM1A antisense oligonucleotide that includes the nucleotide sequence of SEQ ID NO: 254 (5′ TCCTGGTTATTGGTGATGTG 3′ (QPA-709)), or a pharmaceutically acceptable salt thereof,
[0208] a PPM1A antisense oligonucleotide that includes the nucleotide sequence of SEQ ID NO: 339 (5′ CATGTGTTCATCAATCTCCA 3′ (QPA-794)), or a pharmaceutically acceptable salt thereof,
[0209] a PPM1A antisense oligonucleotide that includes the nucleotide sequence of SEQ ID NO: 340 (5′ TCATGTGTTCATCAATCTCC 3′ (QPA-795)), or a pharmaceutically acceptable salt thereof,
[0210] a PPM1A antisense oligonucleotide that includes the nucleotide sequence of SEQ ID NO: 440 (5′ TCTCCACAGTTAATGAAATA 3′ (QPA-895)), or a pharmaceutically acceptable salt thereof,
[0211] a PPM1A antisense oligonucleotide that includes the nucleotide sequence of SEQ ID NO: 445 (5′ TTGAGTCTCCACAGTTAATG 3′ (QPA-900)), or a pharmaceutically acceptable salt thereof,
[0212] a PPM1A antisense oligonucleotide that includes the nucleotide sequence of SEQ ID NO: 450 (5′ ACCTCTTGAGTCTCCACAGT 3′ (QPA-905)), or a pharmaceutically acceptable salt thereof,
[0213] a PPM1A antisense oligonucleotide that includes the nucleotide sequence of SEQ ID NO: 455 (5′ AGTAAACCTCTTGAGTCTCC 3′ (QPA-910)), or a pharmaceutically acceptable salt thereof,
[0214] a PPM1A antisense oligonucleotide that includes the nucleotide sequence of SEQ ID NO: 460 (5′ TACAAAGTAAACCTCTTGAG 3′ (QPA-915)), or a pharmaceutically acceptable salt thereof,
[0215] a PPM1A antisense oligonucleotide that includes the nucleotide sequence of SEQ ID NO: 507 (5′ ATTACTTGGTTTGTGATCTT 3′ (QPA-962)), or a pharmaceutically acceptable salt thereof,
[0216] a PPM1A antisense oligonucleotide that includes the nucleotide sequence of SEQ ID NO: 512 (5′ AGCGGATTACTTGGTTTGTG 3′ (QPA-967)), or a pharmaceutically acceptable salt thereof,
[0217] a PPM1A antisense oligonucleotide that includes the nucleotide sequence of SEQ ID NO: 517 (5′ TCTCCAGCGGATTACTTGGT 3′ (QPA-972)), or a pharmaceutically acceptable salt thereof,
[0218] a PPM1A antisense oligonucleotide that includes the nucleotide sequence of SEQ ID NO: 522 (5′ TTCTTTCTCCAGCGGATTAC 3′ (QPA-977)), or a pharmaceutically acceptable salt thereof,
[0219] a PPM1A antisense oligonucleotide that includes the nucleotide sequence of SEQ ID NO: 532 (5′ TCTGAATTCGTTCTTTCTCC 3′ (QPA-987)), or a pharmaceutically acceptable salt thereof,
[0220] a PPM1A antisense oligonucleotide that includes the nucleotide sequence of SEQ ID NO: 570 (5′ GCCATTCACACGCTGAATCA 3′ (QPA-1025)), or a pharmaceutically acceptable salt thereof,
[0221] a PPM1A antisense oligonucleotide that includes the nucleotide sequence of SEQ ID NO: 575 (5′ AGAGAGCCATTCACACGCTG 3′ (QPA-1030)), or a pharmaceutically acceptable salt thereof,
[0222] a PPM1A antisense oligonucleotide that includes the nucleotide sequence of SEQ ID NO: 579 (5′ AGCCAGAGAGCCATTCACAC 3′ (QPA-1034), or a pharmaceutically acceptable salt thereof,
[0223] a PPM1A antisense oligonucleotide that includes the nucleotide sequence of SEQ ID NO: 585 (5′ CGATACAGCCAGAGAGCCAT 3′ (QPA-1040)), or a pharmaceutically acceptable salt thereof,
[0224] a PPM1A antisense oligonucleotide that includes the nucleotide sequence of SEQ ID NO: 590 (5′ GCCCTCGATACAGCCAGAGA 3′ (QPA-1045)), or a pharmaceutically acceptable salt thereof,
[0225] a PPM1A antisense oligonucleotide that includes the nucleotide sequence of SEQ ID NO: 643 (5′ GCTGCTCAGTAGGACCTTTT 3′ (QPA-1098)), or a pharmaceutically acceptable salt thereof,
[0226] a PPM1A antisense oligonucleotide that includes the nucleotide sequence of SEQ ID NO: 906 (5′ TGCTTCTGGCGATACTTTGG 3′ (QPA-1361)), or a pharmaceutically acceptable salt thereof,
[0227] a PPM1A antisense oligonucleotide that includes the nucleotide sequence of SEQ ID NO: 911 (5′ TTCACTGCTTCTGGCGATAC 3′ (QPA-1366)), or a pharmaceutically acceptable salt thereof,
[0228] a PPM1A antisense oligonucleotide that includes the nucleotide sequence of SEQ ID NO: 916 (5′ CCTTCTTCACTGCTTCTGGC 3′ (QPA-1371)), or a pharmaceutically acceptable salt thereof,
[0229] a PPM1A antisense oligonucleotide that includes the nucleotide sequence of SEQ ID NO: 923 (5′ TCTGCCTCCTTCTTCACTGC 3′ (QPA-1378)), or a pharmaceutically acceptable salt thereof, and
[0230] a PPM1A antisense oligonucleotide that includes the nucleotide sequence of SEQ ID NO: 931 (5′ TGTCCAACTCTGCCTCCTTC 3′ (QPA-1386)), or a pharmaceutically acceptable salt thereof.

[0231] In various embodiments, a PPM1A AON includes linked nucleosides with a nucleobase sequence with a portion of at least 10 contiguous nucleobases that shares 100% identity with an equal length portion of any one of the AON sequences shown in Table 1 or Table 2 (e.g., SEQ ID NOs: 2-955 or SEQ ID NOs: 1910-2863). In various embodiments, a PPM1A AON includes linked nucleosides with a nucleobase sequence with a portion of at least 11, 12, 13, 14, 15, 16, 17, 18, 19, or 20 contiguous nucleobases that shares 100% identity with an equal length portion of any one of the AON sequences shown in Table 1 or Table 2 (e.g., SEQ ID NOs: 2-955 or SEQ ID NOs: 1910-2863).

[0232] Also described herein are PPM1A AONs that share less than 100% sequence identity with PPM1A AON sequences described herein. In various embodiments, a PPM1A AON includes linked nucleosides with a nucleobase sequence with a portion of at least 10 contiguous nucleobases that shares at least 90%, at least 91%, at least 92%, at least 93%, at least 94%, at least 95%, at least 96%, at least 97%, at least 98%, at least 99% identity with an equal length portion of any one of the AON sequences shown in Table 1 or Table 2 (e.g., SEQ ID NOs: 2-955 or SEQ ID NOs: 1910-2863). In various embodiments, a PPM1A AON includes linked nucleosides with a nucleobase sequence with a portion of at least 11, 12, 13, 14, 15, 16, 17, 18, 19, or 20 contiguous nucleobases that shares 100% identity with an equal length portion of any one of the AON sequences shown in Table 1 or Table 2 (e.g., SEQ ID NOs: 2-955 or SEQ ID NOs: 1910-2863).

[0233] PPM1A Gapmer AONs

[0234] In some embodiments, a PPM1A AON has a gapmer design or structure also referred herein merely as “gapmer.” In a gapmer structure the PPM1A AON comprises at least three distinct structural regions including a 5′-wing region, a central region, and a 3′-wing region, in ‘5→3’ orientation.

[0235] In various embodiments, the 5′ wing region includes one, two, three, four, five, six, seven, eight, nine, or ten linked nucleosides. In various embodiments, the 3′ wing region includes one, two, three, four, five, six, seven, eight, nine, or ten linked nucleosides. The 5′ and 3′ wing regions (also termed flanking regions) comprise at least one nucleoside that is adjacent to the central region, which comprises a stretch of contiguous nucleosides. The 5′ and 3′ wing regions may be symmetrical or asymmetrical with respect to the number of nucleosides they include.

[0236] In various embodiments, the 5′ wing region comprises one or more RNA nucleosides (e.g., ribonucleosides). In various embodiments, the 5′ wing region comprises one or more DNA nucleosides (e.g., deoxyribonucleosides). In various embodiments, the 5′ wing region comprises both RNA nucleosides and DNA nucleosides. In various embodiments, the 3′ wing region comprises one or more RNA nucleosides. In various embodiments, the 3′ wing region comprises one or more DNA nucleosides. In various embodiments, the 3′ wing region comprises both RNA nucleosides and DNA nucleosides.

[0237] In various embodiments, the central region includes one, two, three, four, five, six, seven, eight, nine, ten, eleven, twelve, thirteen, fourteen, fifteen, sixteen, seventeen, eighteen, nineteen, or twenty contiguous nucleosides. In some embodiments, the central region comprises a stretch of nucleosides that enable recruitment and activation of RNAseH. In some embodiments, the central region comprises one or more of linked DNA nucleosides, 2′-Fluoro Arabino Nucleic Acids (FANA), and Fluoro Cyclohexenyl nucleic acid (F-CeNA). In some embodiments, all nucleosides of the central region are DNA nucleosides. In some embodiments, the central region comprises a contiguous stretch of 5-16 DNA nucleosides. In some embodiments, the central region comprises a contiguous stretch of 6-15, 7-14, 8-13, or 9-11 DNA nucleosides. In various embodiments, the central region comprises a mix of DNA nucleosides and RNA nucleosides.

[0238] In some embodiments, all of the nucleosides of the central region are DNA nucleosides. In further embodiments the central region may consist of a mixture of DNA nucleosides and other nucleosides (2′-Fluoro Arabino Nucleic Acids (FANA), and Fluoro Cyclohexenyl nucleic acid (F-CeNA)) capable of mediating RNase H cleavage. In some embodiments, at least 50% of the nucleosides of the central region are DNA nucleosides, such as at least 60%, at least 65%, at least 70%, at least 75%, at least 80%, at least 85%, at least 90%, at least 95%, or 100% DNA nucleosides.

[0239] In particular embodiments, the PPM1A AON includes a 5′ wing region of 5 linked nucleosides, a central region of 10 linked nucleosides, and a 3′ wing region of 5 linked nucleosides, also referred to as a 5-10-5 gapmer. In particular embodiments, the PPM1A AON includes a 5′ wing region of 3 linked nucleosides, a central region of 8 linked nucleosides, and a 3′ wing region of 3 linked nucleosides, also referred to as a 3-8-3 gapmer. In particular embodiments, the PPM1A AON includes a 5′ wing region of 3 linked nucleosides, a central region of 10 linked nucleosides, and a 3′ wing region of 3 linked nucleosides, also referred to as a 3-10-3 gapmer. In particular embodiments, the PPM1A AON includes a 5′ wing region of 4 linked nucleosides, a central region of 10 linked nucleosides, and a 3′ wing region of 4 linked nucleosides, also referred to as a 4-10-4 gapmer. In particular embodiments, the PPM1A AON includes a 5′ wing region of 4 linked nucleosides, a central region of 8 linked nucleosides, and a 3′ wing region of 4 linked nucleosides, also referred to as a 4-8-4 gapmer.

[0240] Example PPM1A Gapmer AONs described herein include those identified below in Table 3:

TABLE 3
PPM1A Gapmer AONs. The five linked nucleosides at
the 5′ end and the five linked nucleosides at the
3′ end represent the wing regions and may include
a mixture of ribonucleosides and
deoxyribonucleosides (including modified
ribonucleosides and/or modified
deoxyribonucleosides) whereas the ten linked
nucleosides in the central region are
deoxyribonucleosides. Notation of AON sequences
in Table 3 are as follows: W is guanosine, X
is adenosine, Y is cytosine, and Z is thymidine.

| | Start Position of | PPM1A AON |
|---|---|---|
| SEQ ID NO: | SEQ ID NO: 2864 | Sequence (5′-3′) |
| 2868 | 542 | WYZWYTTAGCCCATAZYWYX |
| 2869 | 555 | WYYXWCCTTGCATGCZWYZZ |
| 2870 | 559 | XYXYWCCAGCCTTGCXZWYZ |
| 2871 | 599 | ZWWYXAACCGATCACXWYYW |
| 2872 | 602 | XYZZWGCAAACCGATYXYXW |
| 2873 | 603 | YXYZZGGCAAACCGAZYXYX |
| 2874 | 604 | YYXYZTGGCAAACCGXZYXY |
| 2875 | 605 | ZYYXYTTGGCAAACCWXZYX |
| 2876 | 606 | WZYYXCTTGGCAAACYWXZY |
| 2877 | 607 | XWZYYACTTGGCAAAYYWXZ |
| 2878 | 608 | XXWZYCACTTGGCAAXYYWX |
| 2879 | 609 | YXXWZCCACTTGGCAXXYYW |
| 2880 | 625 | XXWXXTGACCACGATZYXXW |
| 2881 | 642 | WYYYXTCATACACAGYXXXW |
| 2882 | 644 | XZWYYCATCATACACXWYXX |
| 2883 | 646 | WYXZWCCCATCATACXYXWY |
| 2884 | 648 | YXWYXTGCCCATCATXYXYX |
| 2885 | 650 | XYYXWCATGCCCATCXZXYX |
| 2886 | 652 | WXXYYAGCATGCCCAZYXZX |
| 2887 | 655 | ZWXWXACCAGCATGCYYXZY |
| 2888 | 656 | YZWXWAACCAGCATGYYYXZ |
| 2889 | 708 | YYZWWTTATTGGTGAZWZWX |
| 2890 | 709 | ZYYZWGTTATTGGTGXZWZW |
| 2891 | 794 | YXZWZGTTCATCAATYZYYX |
| 2892 | 795 | ZYXZWTGTTCATCAAZYZYY |
| 2893 | 895 | ZYZYYACAGTTAATGXXXZX |
| 2894 | 900 | ZZWXWTCTCCACAGTZXXZW |
| 2895 | 905 | XYYZYTTGAGTCTCCXYXWZ |
| 2896 | 910 | XWZXXACCTCTTGAGZYZYY |
| 2897 | 915 | ZXYXXAGTAAACCTCZZWXW |
| 2898 | 962 | XZZXYTTGGTTTGTGXZYZZ |
| 2899 | 967 | XWYWWATTACTTGGTZZWZW |
| 2900 | 972 | ZYZYYAGCGGATTACZZWWZ |
| 2901 | 977 | ZZYZZTCTCCAGCGGXZZXY |
| 2902 | 987 | ZYZWXATTCGTTCTTZYZYY |
| 2903 | 1025 | WYYXZTCACACGCTGXXZYX |
| 2904 | 1030 | XWXWXGCCATTCACAYWYZW |
| 2905 | 1034 | XWYYXGAGAGCCATTYXYXY |
| 2906 | 1040 | YWXZXCAGCCAGAGAWYYXZ |
| 2907 | 1045 | WYYYZCGATACAGCCXWXWX |
| 2908 | 1098 | WYZWYTCAGTAGGACYZZZZ |
| 2909 | 1361 | ZWYZZCTGGCGATACZZZWW |
| 2910 | 1366 | ZZYXYTGCTTCTGGCWXZXY |
| 2911 | 1371 | YYZZYTTCACTGCTTYZWWY |
| 2912 | 1378 | ZYZWYCTCCTTCTTCXYZWY |
| 2913 | 1386 | ZWZYYAACTCTGCCTYYZZY |

TABLE 4
PPM1A Gapmer AON sequences. The five linked
nucleosides at the 5′ end and the five linked
nucleosides at the 3′ end represent wing regions
and include a mixture of ribonucleosides and
deoxyribonucleosides (including modified
ribonucleosides and/or modified
deoxyribonucleosides) whereas the ten linked
nucleosides in the central region are
deoxyribonucleosides. Notation of AON sequences
in Table 4 are as follows: W is guanosine, X
is adenosine, Y is cytosine, and M is uridine.

| SEQ ID NO: | PPM1A AON Sequence (5′→3′) |
|---|---|
| 2914 | WYMWYTTAGCCCATAMYWYX |
| 2915 | WYYXWCCTTGCATGCMWYMM |
| 2916 | XYXYWCCAGCCTTGCXMWYM |
| 2917 | MWWYXAACCGATCACXWYYW |
| 2918 | XYMMWGCAAACCGATYXYXW |
| 2919 | YXYMMGGCAAACCGAMYXYX |
| 2920 | YYXYMTGGCAAACCGXMYXY |
| 2921 | MYYXYTTGGCAAACCWXMYX |
| 2922 | WMYYXCTTGGCAAACYWXMY |
| 2923 | XWMYYACTTGGCAAAYYWXM |
| 2924 | XXWMYCACTTGGCAAXYYWX |
| 2925 | YXXWMCCACTTGGCAXXYYW |
| 2926 | XXWXXTGACCACGATMYXXW |
| 2927 | WYYYXTCATACACAGYXXXW |
| 2928 | XMWYYCATCATACACXWYXX |
| 2929 | WYXMWCCCATCATACXYXWY |
| 2930 | YXWYXTGCCCATCATXYXYX |
| 2931 | XYYXWCATGCCCATCXMXYX |
| 2932 | WXXYYAGCATGCCCAMYXMX |
| 2933 | MWXWXACCAGCATGCYYXMY |
| 2934 | YMWXWAACCAGCATGYYYXM |
| 2935 | YYMWWTTATTGGTGAMWMWX |
| 2936 | MYYMWGTTATTGGTGXMWMW |
| 2937 | YXMWMGTTCATCAATYMYYX |
| 2938 | MYXMWTGTTCATCAAMYMYY |
| 2939 | MYMYYACAGTTAATGXXXMX |
| 2940 | MMWXWTCTCCACAGTMXXMW |
| 2941 | XYYMYTTGAGTCTCCXYXWM |
| 2942 | XWMXXACCTCTTGAGMYMYY |
| 2943 | MXYXXAGTAAACCTCMMWXW |
| 2944 | XMMXYTTGGTTTGTGXMYMM |
| 2945 | XWYWWATTACTTGGTMMWMW |
| 2946 | MYMYYAGCGGATTACMMWWM |
| 2947 | MMYMMTCTCCAGCGGXMMXY |
| 2948 | MYMWXATTCGTTCTTMYMYY |
| 2949 | WYYXMTCACACGCTGXXMYX |
| 2950 | XWXWXGCCATTCACAYWYMW |
| 2951 | XWYYXGAGAGCCATTYXYXY |
| 2952 | YWXMXCAGCCAGAGAWYYXM |
| 2953 | WYYYMCGATACAGCCXWXWX |
| 2954 | WYMWYTCAGTAGGACYMMMM |
| 2955 | MWYMMCTGGCGATACMMMWW |
| 2956 | MMYXWTGCTTCTGGCWXMXY |
| 2957 | YYMMYTTCACTGCTTYMWWY |
| 2958 | MYMWYCTCCTTCTTCXYMWY |
| 2959 | MWMYYAACTCTGCCTYYMMY |

[0241] Additional exemplary PPM1A Gapmer AONs described herein include:
[0242] a PPM1A AON that includes the nucleotide sequence of SEQ ID NO: 2868 (5′ WYZWYTTAGCCCATAZYWYX 3′), or a pharmaceutically acceptable salt thereof, wherein W is 2′-O-(2-methoxyethyl)guanosine, X is 2′-O-(2-methoxyethyl)adenosine, Y is 2′-O-(2-methoxyethyl)-5-methylcytosine, and Z is 2′-O-(2-methoxyethyl)thymidine;
[0243] a PPM1A AON that includes the nucleotide sequence of SEQ ID NO: 2869 (5′ WYYXWCCTTGCATGCZWYZZ 3′), or a pharmaceutically acceptable salt thereof, wherein W is 2′-O-(2-methoxyethyl)guanosine, X is 2′-O-(2-methoxyethyl)adenosine, Y is 2′-O-(2-methoxyethyl)-5-methylcytosine, and Z is 2′-O-(2-methoxyethyl)thymidine;
[0244] a PPM1A AON that includes the nucleotide sequence of SEQ ID NO: 2870 (5′ XYXYWCCAGCCTTGCXZWYZ 3′), or a pharmaceutically acceptable salt thereof, wherein W is 2′-O-(2-methoxyethyl)guanosine, X is 2′-O-(2-methoxyethyl)adenosine, Y is 2′-O-(2-methoxyethyl)-5-methylcytosine, and Z is 2′-O-(2-methoxyethyl)thymidine;
[0245] a PPM1A AON that includes the nucleotide sequence of SEQ ID NO: 2871 (5′ ZWWYXAACCGATCACXWYYW 3′), or a pharmaceutically acceptable salt thereof, wherein W is 2′-O-(2-methoxyethyl)guanosine, X is 2′-O-(2-methoxyethyl)adenosine, Y is 2′-O-(2-methoxyethyl)-5-methylcytosine, and Z is 2′-O-(2-methoxyethyl)thymidine;
[0246] a PPM1A AON that includes the nucleotide sequence of SEQ ID NO: 2872 (5′ XYZZWGCAAACCGATYXYXW 3′), or a pharmaceutically acceptable salt thereof, wherein W is 2′-O-(2-methoxyethyl)guanosine, X is 2′-O-(2-methoxyethyl)adenosine, Y is 2′-O-(2-methoxyethyl)-5-methylcytosine, and Z is 2′-O-(2-methoxyethyl)thymidine;
[0247] a PPM1A AON that includes the nucleotide sequence of SEQ ID NO: 2873 (5′ YXYZZGGCAAACCGAZYXYX 3′), or a pharmaceutically acceptable salt thereof, wherein W is 2′-O-(2-methoxyethyl)guanosine, X is 2′-O-(2-methoxyethyl)adenosine, Y is 2′-O-(2-methoxyethyl)-5-methylcytosine, and Z is 2′-O-(2-methoxyethyl)thymidine;
[0248] a PPM1A AON that includes the nucleotide sequence of SEQ ID NO: 2874 (5′ YYXYZTGGCAAACCGXZYXY 3′), or a pharmaceutically acceptable salt thereof, wherein W is 2′-O-(2-methoxyethyl)guanosine, X is 2′-O-(2-methoxyethyl)adenosine, Y is 2′-O-(2-methoxyethyl)-5-methylcytosine, and Z is 2′-O-(2-methoxyethyl)thymidine;
[0249] a PPM1A AON that includes the nucleotide sequence of SEQ ID NO: 2875 (5′ ZYYXYTTGGCAAACCWXZYX 3′), or a pharmaceutically acceptable salt thereof, wherein W is 2′-O-(2-methoxyethyl)guanosine, X is 2′-O-(2-methoxyethyl)adenosine, Y is 2′-O-(2-methoxyethyl)-5-methylcytosine, and Z is 2′-O-(2-methoxyethyl)thymidine;
[0250] a PPM1A AON that includes the nucleotide sequence of SEQ ID NO: 2876 (5′ WZYYXCTTGGCAAACYWXZY 3′), or a pharmaceutically acceptable salt thereof, wherein W is 2′-O-(2-methoxyethyl)guanosine, X is 2′-O-(2-methoxyethyl)adenosine, Y is 2′-O-(2-methoxyethyl)-5-methylcytosine, and Z is 2′-O-(2-methoxyethyl)thymidine;
[0251] a PPM1A AON that includes the nucleotide sequence of SEQ ID NO: 2877 (5′ XWZYYACTTGGCAAAYYWXZ 3′), or a pharmaceutically acceptable salt thereof, wherein W is 2′-O-(2-methoxyethyl)guanosine, X is 2′-O-(2-methoxyethyl)adenosine, Y is 2′-O-(2-methoxyethyl)-5-methylcytosine, and Z is 2′-O-(2-methoxyethyl)thymidine;
[0252] a PPM1A AON that includes the nucleotide sequence of SEQ ID NO: 2878 (5′ XXWZYCACTTGGCAAXYYWX 3′), or a pharmaceutically acceptable salt thereof, wherein W is 2′-O-(2-methoxyethyl)guanosine, X is 2′-O-(2-methoxyethyl)adenosine, Y is 2′-O-(2-methoxyethyl)-5-methylcytosine, and Z is 2′-O-(2-methoxyethyl)thymidine;
[0253] a PPM1A AON that includes the nucleotide sequence of SEQ ID NO: 2879 (5′ YXXWZCCACTTGGCAXXYYW 3′), or a pharmaceutically acceptable salt thereof, wherein W is 2′-O-(2-methoxyethyl)guanosine, X is 2′-O-(2-methoxyethyl)adenosine, Y is 2′-O-(2-methoxyethyl)-5-methylcytosine, and Z is 2′-O-(2-methoxyethyl)thymidine;
[0254] a PPM1A AON that includes the nucleotide sequence of SEQ ID NO: 2880 (5′ XXWXXTGACCACGATZYXXW 3′), or a pharmaceutically acceptable salt thereof, wherein W is 2′-O-(2-methoxyethyl)guanosine, X is 2′-O-(2-methoxyethyl)adenosine, Y is 2′-O-(2-methoxyethyl)-5-methylcytosine, and Z is 2′-O-(2-methoxyethyl)thymidine;
[0255] a PPM1A AON that includes the nucleotide sequence of SEQ ID NO: 2881 (5′ WYYYXTCATACACAGYXXXW 3′), or a pharmaceutically acceptable salt thereof, wherein W is 2′-O-(2-methoxyethyl)guanosine, X is 2′-O-(2-methoxyethyl)adenosine, Y is 2′-O-(2-methoxyethyl)-5-methylcytosine, and Z is 2′-O-(2-methoxyethyl)thymidine;
[0256] a PPM1A AON that includes the nucleotide sequence of SEQ ID NO: 2882 (5′ XZWYYCATCATACACXWYXX 3′), or a pharmaceutically acceptable salt thereof, wherein W is 2′-O-(2-methoxyethyl)guanosine, X is 2′-O-(2-methoxyethyl)adenosine, Y is 2′-O-(2-methoxyethyl)-5-methylcytosine, and Z is 2′-O-(2-methoxyethyl)thymidine;
[0257] a PPM1A AON that includes the nucleotide sequence of SEQ ID NO: 2883 (5′ WYXZWCCCATCATACXYXWY 3′), or a pharmaceutically acceptable salt thereof, wherein W is 2′-O-(2-methoxyethyl)guanosine, X is 2′-O-(2-methoxyethyl)adenosine, Y is 2′-O-(2-methoxyethyl)-5-methylcytosine, and Z is 2′-O-(2-methoxyethyl)thymidine;
[0258] a PPM1A AON that includes the nucleotide sequence of SEQ ID NO: 2884 (5′ YXWYXTGCCCATCATXYXYX 3′), or a pharmaceutically acceptable salt thereof, wherein W is 2′-O-(2-methoxyethyl)guanosine, X is 2′-O-(2-methoxyethyl)adenosine, Y is 2′-O-(2-methoxyethyl)-5-methylcytosine, and Z is 2′-O-(2-methoxyethyl)thymidine;
[0259] a PPM1A AON that includes the nucleotide sequence of SEQ ID NO: 2885 (5′ XYYXWCATGCCCATCXZXYX 3′), or a pharmaceutically acceptable salt thereof, wherein W is 2′-O-(2-methoxyethyl)guanosine, X is 2′-O-(2-methoxyethyl)adenosine, Y is 2′-O-(2-methoxyethyl)-5-methylcytosine, and Z is 2′-O-(2-methoxyethyl)thymidine;
[0260] a PPM1A AON that includes the nucleotide sequence of SEQ ID NO: 2886 (5′ WXXYYAGCATGCCCAZYXZX 3′), or a pharmaceutically acceptable salt thereof, wherein W is 2′-O-(2-methoxyethyl)guanosine, X is 2′-O-(2-methoxyethyl)adenosine, Y is 2′-O-(2-methoxyethyl)-5-methylcytosine, and Z is 2′-O-(2-methoxyethyl)thymidine;
[0261] a PPM1A AON that includes the nucleotide sequence of SEQ ID NO: 2887 (5′ ZWXWXACCAGCATGCYYXZY 3′), or a pharmaceutically acceptable salt thereof, wherein W is 2′-O-(2-methoxyethyl)guanosine, X is 2′-O-(2-methoxyethyl)adenosine, Y is 2′-O-(2-methoxyethyl)-5-methylcytosine, and Z is 2′-O-(2-methoxyethyl)thymidine;
[0262] a PPM1A AON that includes the nucleotide sequence of SEQ ID NO: 2888 (5′ YZWXWAACCAGCATGYYYXZ 3′), or a pharmaceutically acceptable salt thereof, wherein W is 2′-O-(2-methoxyethyl)guanosine, X is 2′-O-(2-methoxyethyl)adenosine, Y is 2′-O-(2-methoxyethyl)-5-methylcytosine, and Z is 2′-O-(2-methoxyethyl)thymidine;
[0263] a PPM1A AON that includes the nucleotide sequence of SEQ ID NO: 2889 (5′ YYZWWTTATTGGTGAZWZWX 3′), or a pharmaceutically acceptable salt thereof, wherein W is 2′-O-(2-methoxyethyl)guanosine, X is 2′-O-(2-methoxyethyl)adenosine, Y is 2′-O-(2-methoxyethyl)-5-methylcytosine, and Z is 2′-O-(2-methoxyethyl)thymidine;
[0264] a PPM1A AON that includes the nucleotide sequence of SEQ ID NO: 2890 (5′ ZYYZWGTTATTGGTGXZWZW 3′), or a pharmaceutically acceptable salt thereof, wherein W is 2′-O-(2-methoxyethyl)guanosine, X is 2′-O-(2-methoxyethyl)adenosine, Y is 2′-O-(2-methoxyethyl)-5-methylcytosine, and Z is 2′-O-(2-methoxyethyl)thymidine;
[0265] a PPM1A AON that includes the nucleotide sequence of SEQ ID NO: 2891 (5′ YXZWZGTTCATCAATYZYYX 3′), or a pharmaceutically acceptable salt thereof, wherein W is 2′-O-(2-methoxyethyl)guanosine, X is 2′-O-(2-methoxyethyl)adenosine, Y is 2′-O-(2-methoxyethyl)-5-methylcytosine, and Z is 2′-O-(2-methoxyethyl)thymidine;
[0266] a PPM1A AON that includes the nucleotide sequence of SEQ ID NO: 2892 (5′ ZYXZWTGTTCATCAAZYZYY 3′), or a pharmaceutically acceptable salt thereof, wherein W is 2′-O-(2-methoxyethyl)guanosine, X is 2′-O-(2-methoxyethyl)adenosine, Y is 2′-O-(2-methoxyethyl)-5-methylcytosine, and Z is 2′-O-(2-methoxyethyl)thymidine;
[0267] a PPM1A AON that includes the nucleotide sequence of SEQ ID NO: 2893 (5′ ZYZYYACAGTTAATGXXXZX 3′), or a pharmaceutically acceptable salt thereof, wherein W is 2′-O-(2-methoxyethyl)guanosine, X is 2′-O-(2-methoxyethyl)adenosine, Y is 2′-O-(2-methoxyethyl)-5-methylcytosine, and Z is 2′-O-(2-methoxyethyl)thymidine;
[0268] a PPM1A AON that includes the nucleotide sequence of SEQ ID NO: 2894 (5′ ZZWXWTCTCCACAGTZXXZW 3′), or a pharmaceutically acceptable salt thereof, wherein W is 2′-O-(2-methoxyethyl)guanosine, X is 2′-O-(2-methoxyethyl)adenosine, Y is 2′-O-(2-methoxyethyl)-5-methylcytosine, and Z is 2′-O-(2-methoxyethyl)thymidine;
[0269] a PPM1A AON that includes the nucleotide sequence of SEQ ID NO: 2895 (5′ XYYZYTTGAGTCTCCXYXWZ 3′), or a pharmaceutically acceptable salt thereof, wherein W is 2′-O-(2-methoxyethyl)guanosine, X is 2′-O-(2-methoxyethyl)adenosine, Y is 2′-O-(2-methoxyethyl)-5-methylcytosine, and Z is 2′-O-(2-methoxyethyl)thymidine;
[0270] a PPM1A AON that includes the nucleotide sequence of SEQ ID NO: 2896 (5′ XWZXXACCTCTTGAGZYZYY 3′), or a pharmaceutically acceptable salt thereof, wherein W is 2′-O-(2-methoxyethyl)guanosine, X is 2′-O-(2-methoxyethyl)adenosine, Y is 2′-O-(2-methoxyethyl)-5-methylcytosine, and Z is 2′-O-(2-methoxyethyl)thymidine;
[0271] a PPM1A AON that includes the nucleotide sequence of SEQ ID NO: 2897 (5′ ZXYXXAGTAAACCTCZZWXW 3′), or a pharmaceutically acceptable salt thereof, wherein W is 2′-O-(2-methoxyethyl)guanosine, X is 2′-O-(2-methoxyethyl)adenosine, Y is 2′-O-(2-methoxyethyl)-5-methylcytosine, and Z is 2′-O-(2-methoxyethyl)thymidine;
[0272] a PPM1A AON that includes the nucleotide sequence of SEQ ID NO: 2898 (5′ XZZXYTTGGTTTGTGXZYZZ 3′), or a pharmaceutically acceptable salt thereof, wherein W is 2′-O-(2-methoxyethyl)guanosine, X is 2′-O-(2-methoxyethyl)adenosine, Y is 2′-O-(2-methoxyethyl)-5-methylcytosine, and Z is 2′-O-(2-methoxyethyl)thymidine;
[0273] a PPM1A AON that includes the nucleotide sequence of SEQ ID NO: 2899 (5′ XWYWWATTACTTGGTZZWZW 3′), or a pharmaceutically acceptable salt thereof, wherein W is 2′-O-(2-methoxyethyl)guanosine, X is 2′-O-(2-methoxyethyl)adenosine, Y is 2′-O-(2-methoxyethyl)-5-methylcytosine, and Z is 2′-O-(2-methoxyethyl)thymidine;
[0274] a PPM1A AON that includes the nucleotide sequence of SEQ ID NO: 2900 (5′ ZYZYYAGCGGATTACZZWWZ 3′), or a pharmaceutically acceptable salt thereof, wherein W is 2′-O-(2-methoxyethyl)guanosine, X is 2′-O-(2-methoxyethyl)adenosine, Y is 2′-O-(2-methoxyethyl)-5-methylcytosine, and Z is 2′-O-(2-methoxyethyl)thymidine;
[0275] a PPM1A AON that includes the nucleotide sequence of SEQ ID NO: 2901 (5′ ZZYZZTCTCCAGCGGXZZXY 3′), or a pharmaceutically acceptable salt thereof, wherein W is 2′-O-(2-methoxyethyl)guanosine, X is 2′-O-(2-methoxyethyl)adenosine, Y is 2′-O-(2-methoxyethyl)-5-methylcytosine, and Z is 2′-O-(2-methoxyethyl)thymidine;
[0276] a PPM1A AON that includes the nucleotide sequence of SEQ ID NO: 2902 (5′ ZYZWXATTCGTTCTTZYZYY 3′), or a pharmaceutically acceptable salt thereof, wherein W is 2′-O-(2-methoxyethyl)guanosine, X is 2′-O-(2-methoxyethyl)adenosine, Y is 2′-O-(2-methoxyethyl)-5-methylcytosine, and Z is 2′-O-(2-methoxyethyl)thymidine;
[0277] a PPM1A AON that includes the nucleotide sequence of SEQ ID NO: 2903 (5′ WYYXZTCACACGCTGXXZYX 3′), or a pharmaceutically acceptable salt thereof, wherein W is 2′-O-(2-methoxyethyl)guanosine, X is 2′-O-(2-methoxyethyl)adenosine, Y is 2′-O-(2-methoxyethyl)-5-methylcytosine, and Z is 2′-O-(2-methoxyethyl)thymidine;
[0278] a PPM1A AON that includes the nucleotide sequence of SEQ ID NO: 2904 (5′ XWXWXGCCATTCACAYWYZW 3′), or a pharmaceutically acceptable salt thereof, wherein W is 2′-O-(2-methoxyethyl)guanosine, X is 2′-O-(2-methoxyethyl)adenosine, Y is 2′-O-(2-methoxyethyl)-5-methylcytosine, and Z is 2′-O-(2-methoxyethyl)thymidine;
[0279] a PPM1A antisense AON that includes the nucleotide sequence of SEQ ID NO: 2905 (5′ XWYYXGAGAGCCATTYXYXY 3′), or a pharmaceutically acceptable salt thereof, wherein W is 2′-O-(2-methoxyethyl)guanosine, X is 2′-O-(2-methoxyethyl)adenosine, Y is 2′-O-(2-methoxyethyl)-5-methylcytosine, and Z is 2′-O-(2-methoxyethyl)thymidine;
[0280] a PPM1A AON that includes the nucleotide sequence of SEQ ID NO: 2906 (5′ YWXZXCAGCCAGAGAWYYXZ 3′), or a pharmaceutically acceptable salt thereof, wherein W is 2′-O-(2-methoxyethyl)guanosine, X is 2′-O-(2-methoxyethyl)adenosine, Y is 2′-O-(2-methoxyethyl)-5-methylcytosine, and Z is 2′-O-(2-methoxyethyl)thymidine;
[0281] a PPM1A AON that includes the nucleotide sequence of SEQ ID NO: 2907 (5′ WYYYZCGATACAGCCXWXWX 3′), or a pharmaceutically acceptable salt thereof, wherein W is 2′-O-(2-methoxyethyl)guanosine, X is 2′-O-(2-methoxyethyl)adenosine, Y is 2′-O-(2-methoxyethyl)-5-methylcytosine, and Z is 2′-O-(2-methoxyethyl)thymidine;
[0282] a PPM1A AON that includes the nucleotide sequence of SEQ ID NO: 2908 (5′ WYZWYTCAGTAGGACYZZZZ 3′), or a pharmaceutically acceptable salt thereof, wherein W is 2′-O-(2-methoxyethyl)guanosine, X is 2′-O-(2-methoxyethyl)adenosine, Y is 2′-O-(2-methoxyethyl)-5-methylcytosine, and Z is 2′-O-(2-methoxyethyl)thymidine;
[0283] a PPM1A AON that includes the nucleotide sequence of SEQ ID NO: 2909 (5′ ZWYZZCTGGCGATACZZZWW 3′), or a pharmaceutically acceptable salt thereof, wherein W is 2′-O-(2-methoxyethyl)guanosine, X is 2′-O-(2-methoxyethyl)adenosine, Y is 2′-O-(2-methoxyethyl)-5-methylcytosine, and Z is 2′-O-(2-methoxyethyl)thymidine; and
[0284] a PPM1A AON that includes the nucleotide sequence of SEQ ID NO: 2910 (5′ ZZYXYTGCTTCTGGCWXZXY 3′), or a pharmaceutically acceptable salt thereof, wherein W is 2′-O-(2-methoxyethyl)guanosine, X is 2′-O-(2-methoxyethyl)adenosine, Y is 2′-O-(2-methoxyethyl)-5-methylcytosine, and Z is 2′-O-(2-methoxyethyl)thymidine.
[0285] a PPM1A AON that includes the nucleotide sequence of SEQ ID NO: 2911 (5′ YYZZYTTCACTGCTTYZWWY 3′), or a pharmaceutically acceptable salt thereof, wherein W is 2′-O-(2-methoxyethyl)guanosine, X is 2′-O-(2-methoxyethyl)adenosine, Y is 2′-O-(2-methoxyethyl)-5-methylcytosine, and Z is 2′-O-(2-methoxyethyl)thymidine;
[0286] a PPM1A AON that includes the nucleotide sequence of SEQ ID NO: 2912 (5′ ZYZWYCTCCTTCTTCXYZWY 3′), or a pharmaceutically acceptable salt thereof, wherein W is 2′-O-(2-methoxyethyl)guanosine, X is 2′-O-(2-methoxyethyl)adenosine, Y is 2′-O-(2-methoxyethyl)-5-methylcytosine, and Z is 2′-O-(2-methoxyethyl)thymidine;
[0287] a PPM1A AON that includes the nucleotide sequence of SEQ ID NO: 2913 (5′ ZWZYYAACTCTGCCTYYZZY 3′), or a pharmaceutically acceptable salt thereof, wherein W is 2′-O-(2-methoxyethyl)guanosine, X is 2′-O-(2-methoxyethyl)adenosine, Y is 2′-O-(2-methoxyethyl)-5-methylcytosine, and Z is 2′-O-(2-methoxyethyl)thymidine;

[0288] In various embodiments, exemplary PPM1A gapmer AONs have one or more modified internucleoside linkages. For example, in various embodiments, all of the internucleoside linkages in a PPM1A Gapmer AON described above (e.g., SEQ ID NOs: 2868-2913) are phosphorothioate linkages.

[0289] Chemical Modifications to PPM1A AONs

[0290] As described herein, PPM1A AONs, such as PPM1A AONs with a sequence of any one of SEQ ID NOs: 2-955 or SEQ ID NOs: 1910-2863 or PPM1A Gapmer AONs with a sequence of any one of SEQ ID NOs: 2868-2959, may include one or more chemical modifications to one or more nucleosides and/or to one or more internucleoside linkages. A nucleoside is a base-sugar combination. The nucleobase (also known as base) portion of the nucleoside is normally a heterocyclic base moiety. Nucleotides are nucleosides that further include a phosphate group covalently linked to the sugar portion of the nucleoside. For those nucleosides that include a pentofuranosyl sugar, the phosphate group can be linked to the 2′, 3′ or 5′ hydroxyl moiety of the sugar. Oligonucleotides are formed through the covalent linkage of adjacent nucleosides to one another, to form a linear polymeric oligonucleotide. Within the oligonucleotide structure, the phosphate groups are commonly referred to as forming the internucleoside linkages of the oligonucleotide.

[0291] Modifications to PPM1A AONs encompass substitutions or changes to internucleoside linkages and/or nucleosides (e.g., sugar moieties or nucleobases of nucleosides). Modified PPM1A AONs can be preferred over native forms because of desirable properties such as, for example, enhanced cellular uptake, enhanced affinity for nucleic acid target, increased stability in the presence of nucleases, or increased inhibitory activity. Chemically modified nucleosides, nucleobases, and internucleoside linkages are described in Agrawal and Gait, History and Development of Nucleotide Analogues in Nucleic Acids Drugs, in Drug Discovery Series No. 68, Advances in Nucleic Acid Therapeutics, 1-21 (Agrawal and Gait eds., 2019), the contents of which are incorporated by reference herein.

[0292] Modified Internucleoside Linkages

[0293] In various embodiments, PPM1A AONs, such as PPM1A AONs with a sequence of any one of SEQ ID NOs: 2-955 or SEQ ID NOs: 1910-2863 or PPM1A Gapmer AONs with a sequence of any one of SEQ ID NOs: 2868-2959, include one or more modified internucleoside linkages. The naturally occurring internucleoside linkage of RNA and DNA is a 3′ to 5′ phosphodiester linkage. PPM1A AONs having one or more modified, i.e., non-naturally occurring, internucleoside linkages can be selected over antisense compounds having naturally occurring internucleoside linkages because of desirable properties such as, for example, enhanced cellular uptake, enhanced affinity for target nucleic acids, and increased stability in the presence of nucleases.

[0294] In various embodiments, PPM1A AONs include linked nucleosides with one or more modified internucleoside linkages that link the individual nucleosides. In various embodiments, PPM1A AONs include one, two, three, four, five, six, seven, eight, nine, ten, eleven, twelve, thirteen, fourteen, fifteen, sixteen, seventeen, eighteen, or nineteen modified internucleoside linkages. Examples of modified internucleoside linkages include any one of a phosphorothioate linkage, an alkyl phosphate linkage, an alkylphosphonate linkage, a 3-methoxypropyl phosphonate linkage, a phosphorodithioate linkage, a phosphotriester linkage, a methylphosphonate linkage, an aminoalkylphosphotriester linkage, an alkylene phosphonate linkage, a phosphinate linkage, a phosphoramidate linkage, a phosphoramidothioate linkage, a phosphorodiamidate (e.g., comprising a phosphorodiamidate morpholino (PMO), 3′ amino ribose, or 5′ amino ribose) linkage, an aminoalkylphosphoramidate linkage, a thiophosphoramidate linkage, a thionoalkylphosphonate linkage, a thionoalkylphosphotriester linkage, a thiophosphate linkage, a selenophosphate linkage, and a boranophosphate linkage.

[0295] In various embodiments, each modified internucleoside linkage of the PPM1A AON can be designed independent of other modified internucleoside linkages of the PPM1A AON. In other words, the modified internucleoside linkages of a PPM1A AON need not all be the same type of modified internucleoside linkage. In various embodiments, the modified internucleoside linkages are interspersed throughout the antisense compound.

[0296] In various embodiments, the PPM1A AON includes at least one phosphorothioate linkage. In various embodiments, the PPM1A AON includes at least two, at least three, at least four, at least five, at least six, at least seven, at least eight, at least nine, at least ten, at least eleven, at least twelve, at least thirteen, at least fourteen, at least fifteen, at least sixteen, at least seventeen, at least eighteen, or at least nineteen phosphorothioate linkages. In particular embodiments, the PPM1A AON includes thirteen, fifteen, seventeen, or nineteen phosphorothioate linkages. In particular embodiments, all internucleoside linkages of the PPM1A AON are phosphorothioate linkages.

[0297] In various embodiments, a PPM1A AON includes a mixture of modified internucleoside linkages and naturally occurring phosphodiester linkages. For example, a PPM1A AON includes at least one phosphodiester linkage and at least one phosphorothioate linkage. In various embodiments, a PPM1A AON includes between 6 and 10, between 6 and 9, between 6 and 8, between 7 and 10, between 7 and 9, or 6, 7, or 8 phosphorothioate linkages. In some embodiments, a PPM1A AON includes 6, 7, 8, 9, or 10 phosphorothioate linkages. In some embodiments, a PPM1A AON includes between 6 and 10, between 6 and 9, between 6 and 8, between 7 and 10, between 7 and 9, or 6, 7, or 8 phosphodiester linkages. In some embodiments, a PPM1A AON includes 6, 7, 8, 9, or 10 phosphodiester linkages.

[0298] In particular embodiments, a PPM1A AON includes 10 phosphorothioate linkages and 9 phosphodiester linkages. In particular embodiments, a PPM1A AON includes 6 phosphorothioate linkages and 7 phosphodiester linkages. In particular embodiments, a PPM1A AON includes 6 phosphorothioate linkages and 9 phosphodiester linkages. In particular embodiments, a PPM1A AON includes 8 phosphorothioate linkages and 9 phosphodiester linkages. In particular embodiments, a PPM1A AON includes 8 phosphorothioate linkages and 7 phosphodiester linkages.

[0299] In some embodiments, PPM1A AON includes internucleoside linkages that are designed according to the gapmer design of the PPM1A AON. In some embodiments, the 5′ wing region includes at least one modified internucleoside linkage (e.g., modified from the naturally occurring internucleoside linkage of a 3′ to 5′ phosphodiester linkage). In some embodiments, the 5′ wing region includes at least two, at least three, at least four, at least five, at least six, at least seven, at least eight, at least nine, or at least ten modified internucleoside linkages. In some embodiments, the 3′ wing region includes at least one modified internucleoside linkage. In some embodiments, the 3′ wing region includes at least two, at least three, at least four, at least five, at least six, at least seven, at least eight, at least nine, or at least ten modified internucleoside linkages. In some embodiments, the central region includes at least one modified internucleoside linkage. In some embodiments, the central region includes at least two, at least three, at least four, at least five, at least six, at least seven, at least eight, at least nine, or at least ten modified internucleoside linkages.

[0300] In particular embodiments all internucleoside linkages of the 5′ wing region are modified internucleoside linkages, such as phosphorothioate linkages. In particular embodiments all internucleoside linkages of the 3′ wing region are modified internucleoside linkages, such as phosphorothioate linkages. In particular embodiments all internucleoside linkages of the central region are modified internucleoside linkages, such as phosphorothioate linkages. In particular embodiments all internucleoside linkages of each of the 5′ wing region, 3′ wing region, and the central region are modified internucleoside linkages, such as phosphorothioate linkages.

[0301] In some embodiments, the one or more modified internucleoside linkages in the 5′ wing region, 3′ wing region, or the central region are phosphorothioate internucleoside linkages. In some embodiments, the phosphorothioate linkages are stereochemically pure phosphorothioate linkages. In some embodiments the phosphorothioate linkages are Sp phosphorothioate linkages. In other embodiments, the phosphorothioate linkages are Rp phosphorothioate linkages.

[0302] In some embodiments, the one or more modified internucleoside linkages in the 5′ wing region, 3′ wing region, or the central region can be any of an alkyl phosphate linkage, an alkylphosphonate linkage, a 3-methoxypropyl phosphonate linkage, a phosphorodithioate linkage, a phosphotriester linkage, a methylphosphonate linkage, an aminoalkylphosphotriester linkage, an alkylene phosphonate linkage, a phosphinate linkage, a phosphoramidate linkage, a phosphoramidothioate linkage, a phosphorodiamidate (e.g., comprising a phosphorodiamidate morpholino (PMO), 3′ amino ribose, or 5′ amino ribose) linkage, an aminoalkylphosphoramidate linkage, a thiophosphoramidate linkage, a thionoalkylphosphonate linkage, a thionoalkylphosphotriester linkage, a thiophosphate linkage, a selenophosphate linkage, and a boranophosphate linkage. In various embodiments, each modified internucleoside linkage of the 5′ wing region, 3′ wing region, or the central region can be designed independent of other modified internucleoside linkages. In other words, the modified internucleoside linkages of 5′ wing region, 3′ wing region, and the central region need not all be the same type of modified internucleoside linkage. In various embodiments, modified internucleoside linkages are interspersed throughout the antisense compound.

[0303] In various embodiments, one or more internucleoside linkages of the 5′ wing region, the 3′ wing region, or the central region are naturally occurring linkages (e.g., phosphodiester bonds). In various embodiments, all internucleoside linkages of the central region are unmodified internucleoside linkages (e.g., phosphodiester linkages).

[0304] In various embodiments, the internucleoside linkages of the one region (e.g., 5′ wing region, 3′ wing region, or the central region) may differ from the internucleoside linkages of another region. In particular embodiments, the 5′ wing region includes at least one modified internucleoside linkage, the 3′ wing region includes at least one modified internucleoside linkage, and all internucleoside linkages of the central region are unmodified internucleoside linkages (e.g., phosphodiester linkages). In some embodiments, the central region of the oligonucleotide comprises phosphodiester bonds and the 5′ wing region and 3′ wing region each comprises one or more phosphorothioate linkages. In particular embodiments, all internucleoside linkages of the 5′ wing region are modified internucleoside linkages, all internucleoside linkages of the 3′ wing region are modified internucleoside linkages, and all internucleoside linkages of the central region are unmodified internucleoside linkages (e.g., phosphodiester linkages).

[0305] In particular embodiments, the PPM1A gapmer AON is a 5-10-5 gapmer and the internucleoside linkages of the PPM1A gapmer AON are denoted as: sssssssssssssssssss (where “s” refers to a phosphorothioate bond) where all the phosphorothioate bonds are in the 5′ wing region or the 3′ wing region and all the phosphodiester bonds are in the central region of the PPM1A AON.

[0306] In particular embodiments, the PPM1A gapmer AON is a 5-10-5 gapmer and the internucleoside linkages of the PPM1A gapmer AON are denoted as any of: sssssooooooooosssss, ooooosssssssssooooo, oooooooooooooosssss, soosssssssssssssoos, soossssssssssssssss, ssssssssssssssssoos, and sssssoooooooooooooo (where “s” refers to a phosphorothioate bond and “o” refers to a phosphodiester bond) where all the phosphorothioate bonds are in the 5′ wing region or the 3′ wing region and all the phosphodiester bonds are in the central region of the PPM1A AON. In particular embodiments, the PPM1A gapmer AON is a 3-8-3 gapmer and the internucleoside linkages of the PPM1A gapmer AON are denoted as: sssssssssssss (where “s” refers to a phosphorothioate bond) where all the phosphorothioate bonds are in the 5′ wing region or the 3′ wing region and all the phosphodiester bonds are in the central region of the PPM1A AON.

[0307] In particular embodiments, the PPM1A gapmer AON is a 3-8-3 gapmer and the internucleoside linkages of the PPM1A gapmer AON are denoted as any of: sssooooooosss, ooosssssssooo, ssssssssssooo, sosssssssssos, sosssssssssss, sssssssssssos, and ooossssssssss (where “s” refers to a phosphorothioate bond and “o” refers to a phosphodiester bond) where all the phosphorothioate bonds are in the 5′ wing region or the 3′ wing region and all the phosphodiester bonds are in the central region of the PPM1A AON. In particular embodiments, the PPM1A gapmer AON is a 3-10-3 gapmer and the internucleoside linkages of the PPM1A gapmer AON are denoted as: sssssssssssssss (where “s” refers to a phosphorothioate bond) where all the phosphorothioate bonds are in the 5′ wing region or the 3′ wing region and all the phosphodiester bonds are in the central region of the PPM1A AON.

[0308] In particular embodiments, the PPM1A gapmer AON is a 3-10-3 gapmer and the internucleoside linkages of the PPM1A gapmer AON are denoted as any of: sssooooooooosss, ooosssssssssooo, ssssssssssssooo, sosssssssssssos, sosssssssssssss, sssssssssssssos, and ooossssssssssss (where “s” refers to a phosphorothioate bond and “o” refers to a phosphodiester bond) where all the phosphorothioate bonds are in the 5′ wing region or the 3′ wing region and all the phosphodiester bonds are in the central region of the PPM1A AON. In particular embodiments, the PPM1A gapmer AON is a 4-10-4 gapmer and the internucleoside linkages of the PPM1A gapmer AON are denoted as: sssssssssssssssss (where “s” refers to a phosphorothioate bond) where all the phosphorothioate bonds are in the 5′ wing region or the 3′ wing region and all the phosphodiester bonds are in the central region of the PPM1A AON.

[0309] In particular embodiments, the PPM1A gapmer AON is a 4-10-4 gapmer and the internucleoside linkages of the PPM1A gapmer AON are denoted as any of: ssssooooooooossss, oooosssssssssoooo, sssssssssssssoooo, soosssssssssssoos, soossssssssssssss, ssssssssssssssoos, and oooosssssssssssss (where “s” refers to a phosphorothioate bond and “o” refers to a phosphodiester bond) where all the phosphorothioate bonds are in the 5′ wing region or the 3′ wing region and all the phosphodiester bonds are in the central region of the PPM1A AON. In particular embodiments, the PPM1A gapmer AON is a 4-8-4 gapmer and the internucleoside linkages of the PPM1A gapmer AON are denoted as: sssssssssssssss (where “s” refers to a phosphorothioate bond) where all the phosphorothioate bonds are in the 5′ wing region or the 3′ wing region and all the phosphodiester bonds are in the central region of the PPM1A AON.

[0310] In particular embodiments, the PPM1A gapmer AON is a 4-8-4 gapmer and the internucleoside linkages of the PPM1A gapmer AON are denoted as any of: ssssooooooossss, oooosssssssoooo, sssssssssssoooo, soosssssssssoos, soossssssssssss, ssssssssssssoos, and oooosssssssssss (where “s” refers to a phosphorothioate bond and “o” refers to a phosphodiester bond) where all the phosphorothioate bonds are in the 5′ wing region or the 3′ wing region and all the phosphodiester bonds are in the central region of the PPM1A AON.

[0311] Modified Sugar Moieties

[0312] PPM1A AONs, such as PPM1A AONs with a sequence of any one of SEQ ID NOs: 2-955 or SEQ ID NOs: 1910-2863 or PPM1A Gapmer AONs with a sequence of any one of SEQ ID NOs: 2868-2959, can contain one or more nucleosides wherein the sugar group has been modified. Such sugar modified nucleosides may impart enhanced nuclease stability, increased binding affinity, or some other beneficial biological property to the antisense compounds.

[0313] In various embodiments, nucleosides with a modified sugar moiety include a ribose in which the 2′-OH group may be replaced by any one selected from the group consisting of OR, R, R′OR, SH, SR, NH₂, NR₂, N₃, CN, F, Cl, Br, and I (wherein R is an alkyl or aryl and R′ is an alkylene), a 2′-O-methyl (2′-OMe) nucleoside, 2′-O-(2-methoxyethyl) (2′MOE) nucleoside, peptide nucleic acid (PNA), bicyclic nucleic acid (BNA), 2′-deoxy-2′-fluoro nucleoside, 2′-fluoro-β-D-arabinonucleoside, locked nucleic acid (LNA), constrained ethyl 2′-4′-bridged nucleic acid (cEt), S-cEt, morpholino oligomer, tcDNA, 2′-O, 4′-C-ethylene linked nucleic acid (ENA), hexitol nucleic acids (HNA), and tricyclic analog (e.g., tcDNA).

[0314] In certain embodiments, nucleosides comprise chemically modified ribofuranose ring moieties. Examples of chemically modified ribofuranose rings include without limitation, addition of substituent groups (including 5′ and 2′ substituent groups, bridging of non-geminal ring atoms to form bicyclic nucleic acids (BNA), replacement of the ribosyl ring oxygen atom with S, N(R), or C(R₁)(R₂) (R, R₁ and R₂ are each independently H, C₁-C₁₂ alkyl or a protecting group) and combinations thereof Examples of chemically modified sugars include 2′-F-5′-methyl substituted nucleoside (see PCT International Application WO 2008/101157 Published on Aug. 21, 2008 for other disclosed 5′,2′-bis substituted nucleosides) or replacement of the ribosyl ring oxygen atom with S or CF₂ with further substitution at the 2′-position (see published U.S. Patent Application US2005-0130923, published on Jun. 16, 2005) or alternatively 5′-substitution of a BNA (see PCT International Application WO 2007/134181 Published on Nov. 22, 2007 wherein LNA is substituted with for example a 5′-methyl or a 5′-vinyl group).

[0315] Examples of nucleosides having modified sugar moieties include without limitation nucleosides comprising 5′-vinyl, 5′-methyl (R or 5), 4′-S, 2′-F, 2′-OCH₃, 2′-OCH₂CH₃, 2′-O CH₂CH₂F and 2′-O(CH₂)₂OCH₃ substituent groups. The substituent at the 2′ position can also be selected from allyl, amino, azido, thio, O-allyl, O—C₁-C₁₀ alkyl, OCF₃, OCH₂F, O(CH₂)₂S CH₃, O(CH₂)₂—O—N(Rₘ)(Rₙ), O—CH₂—C(═O)—N(Rₘ)(Rₙ), and O—CH₂—C(═O)—N(R₁)—(CH₂)₂—N(Rₘ)(Rₙ)—, where each Rₗ, Rₘ and Rₙ is, independently, H or substituted or unsubstituted C₁-C₁₀ alkyl.

[0316] Additional examples of modified sugar moieties include a 2′-OMe modified sugar moiety, bicyclic sugar moiety, 2′-O-(2-methoxyethyl) (2′MOE), 2′-deoxy-2′-fluoro nucleoside, 2′-fluoro-β-D-arabinonucleoside, locked nucleic acid (LNA), constrained ethyl 2′-4′-bridged nucleic acid (cEt) (4′-CH(CH₃)—O-2′), S-constrained ethyl (S-cEt) 2′-4′-bridged nucleic acid, 4′-CH₂—O—CH₂-2′, 4′-CH₂—N(R)-2′, 4′-CH(CH₂OCH₃)—O-2′ (“constrained MOE” or “cMOE”), hexitol nucleic acids (HNA), and tricyclic analog (e.g., tcDNA).

[0317] In some embodiments, a PPM1A AON comprises a 2′-O-methyl nucleoside (2′OMe) (e.g., a PPM1A AON comprising one or more 2′OMe modified sugar), 2′-O-(2-methoxyethyl) (2′-MOE) (e.g., a PPM1A AON comprising one or more 2′MOE modified sugar (e.g., 2′-MOE)), peptide nucleic acid (PNA) (e.g., a PPM1A AON comprising one or more N-(2-aminoethyl)-glycine units linked by amide bonds or carbonyl methylene linkage as repeating units in place of a sugar-phosphate backbone), locked nucleic acid (LNA) (e.g., a PPM1A AON comprising one or more locked ribose, and can be a mixture of 2′-deoxy nucleotides or 2′OMe nucleotides), constrained ethyl 2′-4′-bridged nucleic acid (c-ET) (e.g., a PPM1A AON comprising one or more cET sugar), cMOE (e.g., a PPM1A AON comprising one or more cMOE sugar), morpholino oligomer (e.g., a PPM1A AON comprising a backbone comprising one or more PMO), deoxy-2′-fluoro nucleoside (e.g., a PPM1A AON comprising one or more 2′-fluoro-β-D-arabinonucleoside), 2′-0,4′-C-ethylene linked nucleic acid (ENA) (e.g., a PPM1A AON comprising one or more ENA modified sugar), hexitol nucleic acid (HNA) (e.g., a PPM1A AON comprising one or more HNA modified sugar), or tricyclic analog (tcDNA) (e.g., a PPM1A AON comprising one or more tcDNA modified sugar).

[0318] As used herein, “bicyclic nucleosides” refer to modified nucleosides comprising a bicyclic sugar moiety. Examples of bicyclic nucleosides include without limitation nucleosides comprising a bridge between the 4′ and the 2′ ribosyl ring atoms. In certain embodiments, antisense compounds provided herein include one or more bicyclic nucleosides comprising a 4′ to 2′ bridge. Examples of such 4′ to 2′ bridged bicyclic nucleosides, include but are not limited to one of the formulae: 4′-(CH₂)—O-2′ (LNA); 4′-(CH₂)—S-2′; 4′-(CH₂)₂—O-2′ (ENA); 4′-CH(CH₃)—O-2′ and 4′-CH(CH₂OCH₃)—O-2′ (and analogs thereof (see U.S. Pat. No. 7,399,845, issued on Jul. 15, 2008)); 4′-C(CH₃)(CH₃)—O-2′ (and analogs thereof (see published International Application WO/2009/006478, published Jan. 8, 2009)); 4′-CH₂—N(OCH₃)-2′ (and analogs thereof (see published International Application WO/2008/150729, published Dec. 11, 2008)); 4′-CH₂—O—N(CH₃)-2′ (see published U.S. Patent Application US2004-0171570, published Sep. 2, 2004); 4′-CH₂—N(R)—O-2′, wherein R is H, C₁-C₁₂ alkyl, or a protecting group (see U.S. Pat. No. 7,427,672, issued on Sep. 23, 2008); 4′-CH₂—C(H)(CH₃)-2′ (see Chattopadhyaya et al., J. Org. Chem., 2009, 74, 118-134); and 4′-CH₂—C—(═CH₂)-2′ (and analogs thereof (see published International Application WO 2008/154401, published on Dec. 8, 2008)).

[0319] Further reports related to bicyclic nucleosides can also be found in published literature (see for example: Singh et al., Chem. Commun., 1998, 4, 455-456; Koshkin et al., Tetrahedron, 1998, 54, 3607-3630; Wahlestedt et al., Proc. Natl. Acad. Sci. U.S.A., 2000, 97, 5633-5638; Kumar et al., Bioorg. Med. Chem. Lett., 1998, 8, 2219-2222; Singh et al., J. Org. Chem., 1998, 63, 10035-10039; Srivastava et al., J. Am. Chem. Soc., 2007, 129(26) 8362-8379; Elayadi et al., Curr. Opinion Invest. Drugs, 2001, 2, 558-561; Braasch et al., Chem. Biol., 2001, 8, 1-7; and Orum et al., Curr. Opinion Mol. Ther., 2001, 3, 239-243; U.S. Pat. Nos. 6,268,490; 6,525,191; 6,670,461; 6,770,748; 6,794,499; 7,034,133; 7,053,207; 7,399,845; 7,547,684; and 7,696,345; U.S. Patent Publication No. US2008-0039618; US2009-0012281; U.S. Patent Ser. No. 60/989,574; 61/026,995; 61/026,998; 61/056,564; 61/086,231; 61/097,787; and 61/099,844; Published PCT International applications WO 1994/014226; WO 2004/106356; WO 2005/021570; WO 2007/134181; WO 2008/150729; WO 2008/154401; and WO 2009/006478. Each of the foregoing bicyclic nucleosides can be prepared having one or more stereochemical sugar configurations including for example α-L-ribofuranose and β-D-ribofuranose (see PCT international application PCT/DK98/00393, published on Mar. 25, 1999 as WO 99/14226).

[0320] In certain embodiments, bicyclic sugar moieties of BNA nucleosides include, but are not limited to, compounds having at least one bridge between the 4′ and the 2′ position of the pentofuranosyl sugar moiety wherein such bridges independently comprises 1 or from 2 to 4 linked groups independently selected from —[C(Rₐ)(R_{b})]ₙ—, —C(Rₐ)═C(R_{b})—, —C(Rₐ)═N—, —C(═O)—, —C(═NRₐ)—, —C(═S)—, —O—, —Si(Rₐ)₂—, —S(═O)ₓ—, and —N(Rₐ)—; wherein:

x is 0, 1, or 2;
n is 1, 2, 3, or 4;
each Rₐ and R_{b} is, independently, H, a protecting group, hydroxyl, C₁-C₁₂ alkyl, substituted C₁-C₁₂ alkyl, C₂-C₁₂ alkenyl, substituted C₂-C₁₂ alkenyl, C₂-C₁₂ alkynyl, substituted C₂-C₁₂ alkynyl, C₅-C₂₀ aryl, substituted C₅-C₂₀ aryl, heterocycle radical, substituted heterocycle radical, heteroaryl, substituted heteroaryl, C₅-C₇ alicyclic radical, substituted C₅-C₇ alicyclic radical, halogen, OJ₁, NJ₁J₂, SJ₁, N₃, COOJ₁, acyl (C(═O)—H), substituted acyl, CN, sulfonyl (S(═O)₂-J₁), or sulfoxyl (S(═O)—J₁); and
each J₁ and J₂ is, independently, H, C₁-C₁₂ alkyl, substituted C₁-C₁₂ alkyl, C₂-C₁₂ alkenyl, substituted C₂-C₁₂ alkenyl, C₂-C₁₂ alkynyl, substituted C₂-C₁₂ alkynyl, C₅-C₂₀ aryl, substituted C₅-C₂₀ aryl, acyl (C(═O)—H), substituted acyl, a heterocycle radical, a substituted heterocycle radical, C₁-C₁₂ aminoalkyl, substituted C₁-C₁₂ aminoalkyl or a protecting group.

[0321] In certain embodiments, the bridge of a bicyclic sugar moiety is —[C(Rₐ)(R_{b})]ₙ—, —[—[C(Rₐ)(R_{b})]ₙ—O—, —C(RₐR_{b})—N(R)—O— or —C(RₐR_{b})—O—N(R)—. In certain embodiments, the bridge is 4′-CH₂-2′, 4′-(CH₂)₂-2′, 4′-(CH₂)₃-2′, 4′-CH₂—O-2′, 4′-(CH₂)₂—O-2′, 4′-CH₂—O—N(R)-2′ and 4′-CH₂—N(R)—O-2′- wherein each R is, independently, H, a protecting group or C₁-C₁₂ alkyl, each Rₐ and R_{b} is, independently, H, a protecting group, hydroxyl, C₁-C₁₂ alkyl, substituted C₁-C₁₂ alkyl, C₂-C₁₂ alkenyl, substituted C₂-C₁₂ alkenyl, C₂-C₁₂ alkynyl, substituted C₂-C₁₂ alkynyl, C₅-C₂₀ aryl, substituted C₅-C₂₀ aryl, heterocycle radical, substituted heterocycle radical, heteroaryl, substituted heteroaryl, C₅-C₇ alicyclic radical, substituted C₅-C₇ alicyclic radical, halogen, OJ₁, NJ₁J₂, SJ₁, N₃, COOJ₁, acyl (C(═O)—H), substituted acyl, CN, sulfonyl (S(═O)₂-J₁), or sulfoxyl (S(═O)-J₁).

[0322] In certain embodiments, bicyclic nucleosides are further defined by isomeric configuration. For example, a nucleoside comprising a 4′-2′ methylene-oxy bridge, may be in the α-L configuration or in the β-D configuration. Previously, α-L-methyleneoxy (4′-CH₂—O-2′) BNA's have been incorporated into antisense oligonucleotides that showed antisense activity (Frieden et al., Nucleic Acids Research, 2003, 21, 6365-6372).

[0323] In certain embodiments, bicyclic nucleosides include, but are not limited to, α-L-methyleneoxy (4′-CH₂—O-2′) BNA, β-D-methyleneoxy (4′-CH₂—O-2′) BNA, ethyleneoxy (4′-(CH₂)₂—O-2) BNA, aminooxy (4′-CH₂—O—N(R)-2′) BNA, oxyamino (4′-CH₂—N(R)—O-2′) BNA, methyl(methyleneoxy) (4′-CH(CH₃)—O-2′) BNA, methylene-thio (4′-CH₂—S-2′) BNA, methylene-amino (4′-CH₂—N(R)-2′) BNA, methyl carbocyclic (4′-CH₂—CH(CH₃)-2′) BNA, and propylene carbocyclic (4′-(CH₂)₃-2′) BNA.

[0324] As used herein, “locked nucleic acid” or “LNA” or “LNA nucleosides” refer to modified nucleosides having a bridge (e.g., methylene, ethylene, aminooxy, or oxyimino bridge) connecting two carbon atoms between the 4′ and 2′ position of the nucleoside sugar unit, thereby forming a bicyclic sugar. Examples of such bicyclic sugar include, but are not limited to (A) α-L-Methyleneoxy (4′-CH₂—O-2′) LNA, (B) β-D-Methyleneoxy (4′-CH₂—O-2′) LNA, (C) Ethyleneoxy (4′-(CH₂)₂—O-2′) LNA, (D) Aminooxy (4′-CH₂—O—N(R)-2′) LNA and (E) Oxyamino (4′-CH₂—N(R)—O-2′) LNA; wherein R is H, C₁-C₁₂ alkyl, or a protecting group (see U.S. Pat. No. 7,427,672, issued on Sep. 23, 2008).

[0325] As used herein, LNA nucleosides include, but are not limited to, nucleosides having at least one bridge between the 4′ and the 2′ position of the sugar wherein each of the bridges independently comprises 1 or from 2 to 4 linked groups independently selected from —[C(R₁)(R₂)]ₙ—, —C(R₁)═C(R₂)—, —C(R₁)═N—, —C(═NR₁)—, —C(═O)—, —C(═S)—, —O—, —Si(R₁)₂—, —S(═O)ₓ— and —N(R₁)—; wherein: x is 0, 1, or 2; n is 1, 2, 3, or 4; each R₁ and R₂ is, independently, H, a protecting group, hydroxyl, C₁-C₁₂ alkyl, substituted C₁-C₁₂ alkyl, C₂-C₁₂ alkenyl, substituted C₂-C₁₂ alkenyl, C₂-C₁₂ alkynyl, substituted C₂-C₁₂ alkynyl, C₅-C₂₀ aryl, substituted C₅-C₂₀ aryl, a heterocycle radical, a substituted heterocycle radical, heteroaryl, substituted heteroaryl, C₅-C₇ alicyclic radical, substituted C₅-C₇ alicyclic radical, halogen, OJ₁, NJ₁J₂, SJ₁, N₃, COOJ₁, acyl (C(═O)—H), substituted acyl, CN, sulfonyl (S(═O)₂-J₁), or sulfoxyl (S(═O)-J₁); and each J₁ and J₂ is, independently, H, C₁-C₁₂ alkyl, substituted C₁-C₁₂ alkyl, C₂-C₁₂ alkenyl, substituted C₂-C₁₂ alkenyl, C₂-C₁₂ alkynyl, substituted C₂-C₁₂ alkynyl, C₅-C₂₀ aryl, substituted C₅-C₂₀ aryl, acyl (C(═O)—H), substituted acyl, a heterocycle radical, a substituted heterocycle radical, C₁-C₁₂ aminoalkyl, substituted C₁-C₁₂ aminoalkyl or a protecting group.

[0326] Examples of 4′-2′ bridging groups encompassed within the definition of LNA include, but are not limited to one of formulae: —[C(R₁)(R₂)]ₙ—, —[C(R₁)(R₂)]ₙ—O—, — C(R₁R₂)—N(R₁)—O— or —C(R₁R₂)—O—N(R₁)—. Furthermore, other bridging groups encompassed with the definition of LNA are 4′-CH₂-2′, 4′-(CH₂)₂-2′, 4′-(CH₂)₃-2′, 4′-CH₂—O-2′, 4′-(CH₂)₂—O-2′, 4′-CH₂—O—N(R₁)-2′ and 4′-CH₂—N(R₁)—O-2′- bridges, wherein each R₁ and R₂ is, independently, H, a protecting group or C₁-C₁₂ alkyl.

[0327] Also included within the definition of LNA according to the invention are LNAs in which the 2′-hydroxyl group of the ribosyl sugar ring is connected to the 4′ carbon atom of the sugar ring, thereby forming a bridge to form the bicyclic sugar moiety. The bridge can be a methylene (—CH₂—) group connecting the 2′ oxygen atom and the 4′ carbon atom, for which the term methyleneoxy (4′-CH₂—O-2′) LNA is used. Furthermore, in the case of the bicyclic sugar moiety having an ethylene bridging group in this position, the term ethyleneoxy (4′-CH₂CH₂—O-2′) LNA is used. α-L-methyleneoxy (4′-CH₂—O-2′), an isomer of methyleneoxy (4′-CH₂—O-2′) LNA is also encompassed within the definition of LNA, as used herein.

[0328] In some embodiments, PPM1A AON includes modified sugar moieties that are designed according to the gapmer design of the PPM1A gapmer AON. In various embodiments, PPM1A gapmer AONs include one or more modified sugar moieties. In various embodiments, the 5′ wing region includes at least one modified sugar moiety. In various embodiments, the 3′ wing region includes at least one modified sugar moiety. In various embodiments, the 5′ wing region includes at least two, at least three, at least four, at least five, at least six, at least seven, at least eight, at least nine, or at least ten modified sugar moieties. In various embodiments, the 3′ wing region includes at least two, at least three, at least four, at least five, at least six, at least seven, at least eight, at least nine, or at least ten modified sugar moieties. In some embodiments, each of the 5′ wing region and/or the 3′ wing region includes from 1 to 7 modified sugar moieties, such as from two to six modified sugar moieties, from two to five modified sugar moieties, from two to four modified sugar moieties, or from one to three modified sugar moieties. In particular embodiments, the 5′ wing region includes 3 modified sugar moieties and the 3′ wing region includes 3 modified sugar moieties. In particular embodiments, the 5′ wing region includes 4 modified sugar moieties and the 3′ wing region includes 4 modified sugar moieties. In particular embodiments, the 5′ wing region includes 5 modified sugar moieties and the 3′ wing region includes 5 modified sugar moieties.

[0329] In various embodiments, the nucleosides with a modified sugar moiety in the 5′ and 3′ wing regions are any one of a ribose in which the 2′-OH group may be replaced by any one selected from the group consisting of OR, R, R′OR, SH, SR, NH₂, NR₂, N₃, CN, F, Cl, Br, and I (wherein R is an alkyl or aryl and R′ is an alkylene), a 2′-O-methyl (2′-OMe) nucleoside, 2′-O-(2-methoxyethyl) (2′MOE) nucleoside, peptide nucleic acid (PNA), bicyclic nucleic acid (BNA), 2′-deoxy-2′-fluoro nucleoside, 2′-fluoro-β-D-arabinonucleoside, locked nucleic acid (LNA), constrained ethyl 2′-4′-bridged nucleic acid (cEt), S-cEt, morpholino oligomer, tcDNA, 2′-0,4′-C-ethylene linked nucleic acid (ENA), hexitol nucleic acids (HNA), and tricyclic analog (e.g., tcDNA).

[0330] In some embodiments, the 5′ wing region and/or 3′ wing region comprises at least one 2′-MOE nucleoside. In some embodiments both the 5′ and 3′ wing regions comprise at least one 2′-MOE nucleoside. In some embodiments, each of the 5′ wing region and the 3′ wing region comprises two, three, four, five, six, seven, eight, nine, or ten 2′-MOE nucleosides. In some embodiments, all the nucleosides in each of the 5′ wing region and the 3′ wing region are 2′-MOE nucleosides.

[0331] In other embodiments, the wing regions may comprise both 2′-MOE nucleosides and other nucleosides (mixed wings), such as DNA nucleosides and/or non-MOE modified nucleosides, such as bicyclic nucleosides (BNAs) (e.g., locked nucleic acid (LNA) nucleosides or constrained ethyl 2′-4′-bridged nucleic acid (cEt) nucleosides), 2′-O-methyl nucleosides, tricycloDNA, S-cEt, morpholinos, or other 2′ substituted nucleosides.

[0332] In some embodiments, the 5′ wing region or the 3′ wing region comprises at least one BNA (e.g., at least one LNA nucleoside or cET nucleoside). In some embodiments each of the 5′ and 3′ wing regions comprises a BNA. In some embodiments all the nucleosides in the 5′ and 3′ wing regions are BNAs. In a further embodiment, the BNAs in the 5′ and/or 3′ wing regions are independently selected from the group comprising oxy-LNA, thio-LNA, amino-LNA, cET, and/or ENA, in either the beta-D or alpha-L configurations or combinations thereof.

[0333] In some embodiments, the 5′ and/or 3′ wing comprises at least one 2′-O-methyl nucleoside. In some embodiments, the 5′ wing comprises at least one 2′-O-methyl nucleoside. In some embodiments both the 5′ and 3′ wing regions comprise a 2′-O-methyl nucleoside. In some embodiments all the nucleosides in the wing regions are 2′-O-methyl nucleosides.

[0334] Modified Nucleobase

[0335] In various embodiments, PPM1A AONs, such as PPM1A AONs with a sequence of any one of SEQ ID NOs: 2-955 or SEQ ID NOs: 1910-2863 or PPM1A Gapmer AONs with a sequence of any one of SEQ ID NOs: 2868-2959, include one or more modified nucleobases.

[0336] Examples of modified nucleobases, including a 5-methylpyrimidine, for example, 5-methylcytosine or 5-methoxyuridine, a 5-methylpurine, for example, 5-methylguanine, or pseudouridine.

[0337] In various embodiments, a PPM1A AON includes at least one modified nucleobase. In various embodiments, a PPM1A AON includes two, three, four, five, six, seven, eight, nine, or ten modified nucleobases. In various embodiments, a PPM1A AON includes at least one 5-methylcytosine nucleobase. In various embodiments, a PPM1A AON includes two, three, four, five, six, seven, eight, nine, or ten 5-methylcytosine nucleobases.

[0338] In various embodiments, a PPM1A AON includes both modified and unmodified nucleobases. For example, a PPM1A AON may include both cytosines and 5-methyl cytosines. In some embodiments, a PPM1A AON may include one, two three, four, five, six, seven, eight, nine, or ten cytosines and further include one, two, three, four, five, six seven, eight, nine, or ten 5-methylcytosines.

[0339] In various embodiments, each of a particular type of nucleobase in the PPM1A AON is replaced with a corresponding modified nucleobase. For example, every guanine of the PPM1A AON is replaced with a 5-methyl guanine. As another example, every cytosine of the PPM1A AON is replaced with a 5-methylcytosine.

[0340] In some embodiments, a PPM1A AON includes modified nucleobases that are designed according to the gapmer design of the PPM1A gapmer AON. In various embodiments, the linked nucleosides of the 5′ wing region, the linked nucleosides of the 3′ wing region, or the linked nucleosides of the central region comprise one or more modified nucleobases. In some embodiments, the 5′ wing region and/or the 3′ wing region includes one to ten modified nucleobases, such as from two to eight modified nucleobases, from three to six modified nucleobases, or from four to five modified nucleobases. In some embodiments, the 5′ wing region and/or the 3′ wing region includes one, two, three, four, five, six, seven, eight, nine, or ten modified nucleobases. In some embodiments, the central region includes one to ten modified nucleobases, such as from two to eight modified nucleobases, from three to six modified nucleobases, or from four to five modified nucleobases. In some embodiments, the central region includes one, two, three, four, five, six, seven, eight, nine, or ten modified nucleobases. Examples of modified nucleobases include a 5-methylpyrimidine, for example, 5-methylcytosine or 5-methoxyuridine, a 5-methylpurine, for example, 5-methylguanine, or pseudouridine.

[0341] In various embodiments, at least one cytosine in the 5′ wing region and/or the 3′ wing region of the PPM1A AON is replaced with a modified nucleobase, such as a 5-methylcytosine. In various embodiments, at least one cytosine in the 5′ wing region is replaced with a modified nucleobase, such as a 5-methylcytosine. In various embodiments, at least one cytosine in the 3′ wing region is replaced with a modified nucleobase, such as a 5-methylcytosine. In various embodiments, at least one cytosine in the central region is replaced with a modified nucleobase, such as a 5-methylcytosine. In various embodiments, all cytosines in the 5′ wing region are replaced with modified nucleobases, such as 5-methylcytosines. In various embodiments, all cytosines in the 3′ wing region are replaced with modified nucleobases, such as 5-methylcytosines. In various embodiments, all cytosines in the central region are replaced with modified nucleobases, such as 5-methylcytosines.

[0342] In particular embodiments, all cytosines in the 5′ wing region, all cytosines in the 3′ wing region, and all cytosines in the central region are replaced with modified nucleobases, such as 5-methylcytosines. In particular embodiments, all cytosines in the 5′ wing region, all cytosines in the 3′ wing region are replaced with modified nucleobases, such as 5-methylcytosines; however, all cytosines in the central region are unmodified nucleobases.

[0343] Modified Oligonucleotides

[0344] Described herein are additional embodiments of modified oligonucleotides, which can include any of the modified internucleoside linkages and/or modified nucleosides (e.g., modified sugar moieties, and/or modified nucleobases) described above.

[0345] In some embodiments, a PPM1A AON, or a pharmaceutically acceptable salt thereof, includes the nucleotide sequence of any one of SEQ ID NOs: 2-955, SEQ ID NOs: 1910-2863, SEQ ID NOs: 2868-2913, and SEQ ID NOs: 2914-2959 where at least one nucleoside of the nucleoside sequence is substituted with a 2′-O-(2-methoxyethyl) nucleoside, a 2′-O-methyl nucleoside, a 2′-deoxy-2′-fluoro nucleoside, a 2′-fluoro-β-D-arabinonucleoside, a bicylic nucleic acid, a bridged nucleic acid, a locked nucleic acid (LNA), a constrained ethyl (cET) nucleic acid, a tricyclo-DNA (tcDNA), a 2′-0,4′-C-ethylene linked nucleic acid (ENA), or a peptide nucleic acid (PNA). In particular embodiments, at least one internucleoside linkage of the PPM1A AON is a phosphorothioate linkage. In some embodiments, all internucleoside linkages of the PPM1A AON are phosphorothioate linkages. Also described herein are pharmaceutical compositions that include any of the foregoing antisense oligonucleotides, or a pharmaceutically acceptable salt thereof, and a pharmaceutically acceptable excipient.

[0346] PPM1A AONs described herein, can include chemically modified nucleosides, including modified ribonucleosides and modified deoxyribonucleosides. Chemically modified nucleosides include 2′-substituted nucleosides in which the 2′ position of the sugar ring includes a moiety other than —H or —OH (for example, —F or an O-alkyl group). For example, chemically modified nucleosides include, but are not limited to 2′-O-(2-methoxyethyl) modifications, for example, 2′-O-(2-methoxyethyl)guanosine, 2′-O-(2-methoxyethyl)adenosine, 2′-O-(2-methoxyethyl)cytosine, and 2′-O-(2-methoxyethyl)thymidine.

[0347] In some embodiments, PPM1A AONs can include chemically modified nucleosides, for example, 2′ O-methyl ribonucleosides, for example, 2′ O-methyl cytidine, 2′ O-methyl guanosine, 2′ O-methyl uridine, and/or 2′ O-methyl adenosine. PPM1A AONs described herein, can also include one or more chemically modified bases, including a 5-methyl pyrimidine, for example, 5-methylcytosine, and/or a 5-methyl purine, for example, 5-methyl guanine. PPM1A AONs described herein, can also include any of the following chemically modified nucleosides: 5-methyl-2′-O-methylcytidine, 5-methyl-2′-O-methylthymidine, 5-methylcytidine, 5-methyluridine, and/or 5-methyl 2′-deoxycytidine.

[0348] It is contemplated that in some embodiments, a disclosed PPM1A AON may optionally have at least one modified nucleobase, e.g., 5-methylcytosine, and/or at least one methylphosphonate nucleotide, which is placed, for example, either at only one of the 5′ or 3′ ends or at both 5′ and 3′ ends or along the oligonucleotide sequence.

[0349] In certain embodiments, the disclosure provides mixed modalities of PPM1A AONs with combinations of modified nucleosides, e.g., a combination of a PPM1A peptide nucleic acid (PNA) and a PPM1A locked nucleic acid (LNA). Chemically modified nucleosides also include, but are not limited to, locked nucleic acids (LNAs), 2′-O-methyl, 2′-fluoro, and 2′-fluoro-β-D-arabinonucleotide (FANA) modifications. Chemically modified nucleosides that can be included in PPM1A AONs described herein are described in Johannes and Lucchino, (2018) “Current Challenges in Delivery and Cytosolic Translocation of Therapeutic RNAs” Nucleic Acid Ther. 28(3): 178-93; Rettig and Behlke, (2012) “Progress toward in vivo use of siRNAs-II” Mol Ther 20:483-512; and Khvorova and Watts, (2017) “The chemical evolution of oligonucleotide therapies of clinical utility” Nat Biotechnol., 35(3):238-48, the contents of each of which are incorporated by reference herein.

[0350] PPM1A AONs described herein can include chemical modifications that promote stabilization of an oligonucleotide's terminal 5′-phosphate and phosphatase-resistant analogs of 5′-phosphate. Chemical modifications that promote oligonucleotide terminal 5′-phosphate stabilization or which are phosphatase-resistant analogs of 5′-phosphate include, but are not limited to, 5′-methyl phosphonate, 5′-methylenephosphonate, 5′-methylenephosphonate analogs, 5′-E-vinyl phosphonate (5′-E-VP), 5′-phosphorothioate, and 5′-C-methyl analogs. Chemical modifications that promote AON terminal 5′-phosphate stabilization and phosphatase-resistant analogues of 5′-phosphate are described in Khvorova and Watts, (2017) “The chemical evolution of oligonucleotide therapies of clinical utility” Nat Biotechnol., 35(3):238-48, the contents of which are incorporated by reference herein.

[0351] In some embodiments described herein, a PPM1A AON, or a pharmaceutically acceptable salt thereof, is a modified oligonucleotide which includes the nucleotide sequence of any one of SEQ ID NOs: 2-955, SEQ ID NOs: 1910-2863, SEQ ID NOs: 2868-2913, and SEQ ID NOs: 2914-2959, wherein the PPM1A AON includes a modification of at least one nucleoside or at least one internucleoside linkage. For example, in some embodiments, a PPM1A AON, or a pharmaceutically acceptable salt thereof, includes the nucleotide sequence of any one of SEQ ID NOs: 2-955, SEQ ID NOs: 1910-2863, SEQ ID NOs: 2868-2913, and SEQ ID NOs: 2914-2959, and at least one nucleoside linkage of the nucleotide sequence is a a phosphorothioate linkage, an alkyl phosphate linkage, an alkylphosphonate linkage, a 3-methoxypropyl phosphonate linkage, a phosphorodithioate linkage, a phosphotriester linkage, a methylphosphonate linkage, an aminoalkylphosphotriester linkage, an alkylene phosphonate linkage, a phosphinate linkage, a phosphoramidate linkage, a phosphoramidothioate linkage, a phosphorodiamidate (e.g., comprising a phosphorodiamidate morpholino (PMO), 3′ amino ribose, or 5′ amino ribose) linkage, an aminoalkylphosphoramidate linkage, a thiophosphoramidate linkage, a thionoalkylphosphonate linkage, a thionoalkylphosphotriester linkage, a thiophosphate linkage, a selenophosphate linkage, and a boranophosphate linkage.

[0352] In some embodiments of PPM1A AONs described herein, at least one internucleoside linkage of the nucleotide sequence is a phosphorothioate linkage. For example, in some embodiments of PPM1A AONs described herein, one, two, three, or more internucleoside linkages of the nucleotide sequence is a phosphorothioate linkage. In preferred embodiments of PPM1A AONs described herein, all internucleoside linkages of the nucleotide sequence are phosphorothioate linkages. Thus, in some embodiments, all of the nucleotide linkages of a PPM1A AON of any of SEQ ID NOs: 2-955, SEQ ID NOs: 1910-2863, SEQ ID NOs: 2868-2913, and SEQ ID NOs: 2914-2959 are phosphorothioate linkages. In some embodiments, one or more of the nucleotide linkages of a PPM1A AON of any of SEQ ID NOs: 2-955, SEQ ID NOs: 1910-2863, SEQ ID NOs: 2868-2913, and SEQ ID NOs: 2914-2959 are phosphorothioate linkages.

[0353] Contemplated PPM1A AONs may optionally include at least one modified sugar. For example, the sugar moiety of at least one nucleotide constituting the oligonucleotide is a ribose in which the 2′-OH group may be replaced by any one selected from the group consisting of OR, R, R′OR, SH, SR, NH₂, NR₂, N₃, CN, F, Cl, Br, and I (wherein R is an alkyl or aryl and R′ is an alkylene).

[0354] In particular embodiments, a PPM1A AON has a nucleoside sequence of eeeee-d10-eeeee (where “e” denotes a 2′-O-MOE modified nucleoside and where “d10” denotes a contiguous 10 DNA nucleobase sequence). In this embodiment, the 5′ wing region includes five 2′-O-MOE modified nucleosides, the gap region includes 10 contiguous DNA nucleobases, and the 3′ wing region includes five 2′-O-MOE modified nucleosides. The internucleoside linkages of the PPM1A AON can have the sequence of sssssooooooooosssss (where “s” refers to a phosphorothioate bond and “o” refers to a phosphodiester bond) where all the phosphorothioate bonds are in the 5′ wing region or the 3′ wing region and all the phosphodiester bonds are in the central region of the PPM1A AON. In various embodiments, the PPM1A AON includes unmodified cytosines. In various embodiments, the PPM1A AON includes modified cytosines (e.g., 5-methylcytosine). In various embodiments, all cytosines of the 5′ wing region and the 3′ wing region are modified cytosines (e.g., 5-methylcytosine).

[0355] In particular embodiments, a PPM1A AON has a nucleoside sequence of eeeee-d10-eeeee (where “e” denotes a 2′-O-MOE modified nucleoside and where “d10” denotes a contiguous 10 DNA nucleobase sequence). In this embodiment, the 5′ wing region includes five 2′-O-MOE modified nucleosides, the gap region includes 10 contiguous DNA nucleobases, and the 3′ wing region includes five 2′-O-MOE modified nucleosides. The internucleoside linkages of the PPM1A AON can have the sequence of sssssssssssssssssss (where “s” refers to a phosphorothioate bond) where all internucleoside linkages of the PPM1A AON are phosphorothioate bonds. In various embodiments, the PPM1A AON includes unmodified cytosines. In various embodiments, the PPM1A AON includes modified cytosines (e.g., 5-methylcytosine). In various embodiments, all cytosines of the 5′ wing region and the 3′ wing region are modified cytosines (e.g., 5-methylcytosine).

[0356] In particular embodiments, a PPM1A AON has a nucleoside sequence of eee-d8-eee (where “e” denotes a 2′-O-MOE modified nucleoside and where “d8” denotes a contiguous 8 DNA nucleobase sequence). In this embodiment, the 5′ wing region includes three 2′-O-MOE modified nucleosides, the gap region includes 8 contiguous DNA nucleobases, and the 3′ wing region includes three 2′-O-MOE modified nucleosides. The internucleoside linkages of the PPM1A AON can have the sequence of sssooooooosss (where “s” refers to a phosphorothioate bond and “o” refers to a phosphodiester bond) where all the phosphorothioate bonds are in the 5′ wing region or the 3′ wing region and all the phosphodiester bonds are in the central region of the PPM1A AON. In various embodiments, the PPM1A AON includes unmodified cytosines. In various embodiments, the PPM1A AON includes modified cytosines (e.g., 5-methylcytosine). In various embodiments, all cytosines of the 5′ wing region and the 3′ wing region are modified cytosines (e.g., 5-methylcytosine).

[0357] In particular embodiments, a PPM1A AON has a nucleoside sequence of eee-d8-eee (where “e” denotes a 2′-O-MOE modified nucleoside and where “d8” denotes a contiguous 8 DNA nucleobase sequence). In this embodiment, the 5′ wing region includes three 2′-O-MOE modified nucleosides, the gap region includes 8 contiguous DNA nucleobases, and the 3′ wing region includes three 2′-O-MOE modified nucleosides. The internucleoside linkages of the PPM1A AON can have the sequence of sssssssssssss (where “s” refers to a phosphorothioate bond) where all internucleoside linkages of the PPM1A AON are phosphorothioate bonds. In various embodiments, the PPM1A AON includes unmodified cytosines. In various embodiments, the PPM1A AON includes modified cytosines (e.g., 5-methylcytosine). In various embodiments, all cytosines of the 5′ wing region and the 3′ wing region are modified cytosines (e.g., 5-methylcytosine).

[0358] In particular embodiments, a PPM1A AON has a nucleoside sequence of eee-d10-eee (where “e” denotes a 2′-O-MOE modified nucleoside and where “d10” denotes a contiguous 10 DNA nucleobase sequence). In this embodiment, the 5′ wing region includes three 2′-O-MOE modified nucleosides, the gap region includes 10 contiguous DNA nucleobases, and the 3′ wing region includes three 2′-O-MOE modified nucleosides. The internucleoside linkages of the PPM1A AON can have the sequence of sssooooooooosss (where “s” refers to a phosphorothioate bond and “o” refers to a phosphodiester bond) where all the phosphorothioate bonds are in the 5′ wing region or the 3′ wing region and all the phosphodiester bonds are in the central region of the PPM1A AON. In various embodiments, the PPM1A AON includes unmodified cytosines. In various embodiments, the PPM1A AON includes modified cytosines (e.g., 5-methylcytosine). In various embodiments, all cytosines of the 5′ wing region and the 3′ wing region are modified cytosines (e.g., 5-methylcytosine).

[0359] In particular embodiments, a PPM1A AON has a nucleoside sequence of eee-d10-eee (where “e” denotes a 2′-O-MOE modified nucleoside and where “d10” denotes a contiguous 10 DNA nucleobase sequence). In this embodiment, the 5′ wing region includes three 2′-O-MOE modified nucleosides, the gap region includes 10 contiguous DNA nucleobases, and the 3′ wing region includes three 2′-O-MOE modified nucleosides. The internucleoside linkages of the PPM1A AON can have the sequence of sssssssssssssss (where “s” refers to a phosphorothioate bond) where all internucleoside linkages of the PPM1A AON are phosphorothioate bonds. In various embodiments, the PPM1A AON includes unmodified cytosines. In various embodiments, the PPM1A AON includes modified cytosines (e.g., 5-methylcytosine). In various embodiments, all cytosines of the 5′ wing region and the 3′ wing region are modified cytosines (e.g., 5-methylcytosine).

[0360] In particular embodiments, a PPM1A AON has a nucleoside sequence of eeee-d10-eeee (where “e” denotes a 2′-O-MOE modified nucleoside and where “d10” denotes a contiguous 10 DNA nucleobase sequence). In this embodiment, the 5′ wing region includes four 2′-O-MOE modified nucleosides, the gap region includes 10 contiguous DNA nucleobases, and the 3′ wing region includes four 2′-O-MOE modified nucleosides. The internucleoside linkages of the PPM1A AON can have the sequence of ssssooooooooossss (where “s” refers to a phosphorothioate bond and “o” refers to a phosphodiester bond) where all the phosphorothioate bonds are in the 5′ wing region or the 3′ wing region and all the phosphodiester bonds are in the central region of the PPM1A AON. In various embodiments, the PPM1A AON includes unmodified cytosines. In various embodiments, the PPM1A AON includes modified cytosines (e.g., 5-methylcytosine). In various embodiments, all cytosines of the 5′ wing region and the 3′ wing region are modified cytosines (e.g., 5-methylcytosine).

[0361] In particular embodiments, a PPM1A AON has a nucleoside sequence of eeee-d10-eeee (where “e” denotes a 2′-O-MOE modified nucleoside and where “d10” denotes a contiguous 10 DNA nucleobase sequence). In this embodiment, the 5′ wing region includes four 2′-O-MOE modified nucleosides, the gap region includes 10 contiguous DNA nucleobases, and the 3′ wing region includes four 2′-O-MOE modified nucleosides. The internucleoside linkages of the PPM1A AON can have the sequence of sssssssssssssssss (where “s” refers to a phosphorothioate bond) where all internucleoside linkages of the PPM1A AON are phosphorothioate bonds. In various embodiments, the PPM1A AON includes unmodified cytosines. In various embodiments, the PPM1A AON includes modified cytosines (e.g., 5-methylcytosine). In various embodiments, all cytosines of the 5′ wing region and the 3′ wing region are modified cytosines (e.g., 5-methylcytosine).

[0362] In particular embodiments, a PPM1A AON has a nucleoside sequence of eeee-d8-eeee (where “e” denotes a 2′-O-MOE modified nucleoside and where “d8” denotes a contiguous 8 DNA nucleobase sequence). In this embodiment, the 5′ wing region includes four 2′-O-MOE modified nucleosides, the gap region includes 8 contiguous DNA nucleobases, and the 3′ wing region includes four 2′-O-MOE modified nucleosides. The internucleoside linkages of the PPM1A AON can have the sequence of ssssooooooossss (where “s” refers to a phosphorothioate bond and “o” refers to a phosphodiester bond) where all the phosphorothioate bonds are in the 5′ wing region or the 3′ wing region and all the phosphodiester bonds are in the central region of the PPM1A AON. In various embodiments, the PPM1A AON includes unmodified cytosines. In various embodiments, the PPM1A AON includes modified cytosines (e.g., 5-methylcytosine). In various embodiments, all cytosines of the 5′ wing region and the 3′ wing region are modified cytosines (e.g., 5-methylcytosine).

[0363] In particular embodiments, a PPM1A AON has a nucleoside sequence of eeee-d8-eeee (where “e” denotes a 2′-O-MOE modified nucleoside and where “d8” denotes a contiguous 8 DNA nucleobase sequence). In this embodiment, the 5′ wing region includes four 2′-O-MOE modified nucleosides, the gap region includes 8 contiguous DNA nucleobases, and the 3′ wing region includes four 2′-O-MOE modified nucleosides. The internucleoside linkages of the PPM1A AON can have the sequence of sssssssssssssss (where “s” refers to a phosphorothioate bond) where all internucleoside linkages of the PPM1A AON are phosphorothioate bonds. In various embodiments, the PPM1A AON includes unmodified cytosines. In various embodiments, the PPM1A AON includes modified cytosines (e.g., 5-methylcytosine). In various embodiments, all cytosines of the 5′ wing region and the 3′ wing region are modified cytosines (e.g., 5-methylcytosine).

[0364] PPM1A Gene Product

[0365] Generally, a PPM1A AON disclosed herein includes linked nucleosides with a nucleobase sequence that is at least 90%, at least 91%, at least 92%, at least 93%, at least 94%, at least 95%, at least 96%, at least 97%, at least 98%, at least 99%, or that is 100% complementary to a portion of a PPM1A gene product. In embodiments of the invention described herein, a PPM1A inhibitor can target PPM1A gene products of PPM1A genes of one or more species. For example, a PPM1A inhibitor can target a PPM1A gene product of a mammalian PPM1A gene, for example, a human (i.e., Homo sapiens) PPM1A gene, a rodent PPM1A gene (for example, a mouse (Mus musculus) PPM1A gene), and/or a primate PPM1A gene (for example, a Macaca fascicularis PPM1A gene or a Macaca mulatta PPM1A gene). In particular embodiments, the PPM1A inhibitor targets a human PPM1A gene product. A PPM1A gene product can be, for example, an RNA gene product, for example, an mRNA gene product, or a protein product of a PPM1A gene. In some embodiments, the PPM1A inhibitor includes a nucleotide sequence that is complementary to a nucleotide sequence of a PPM1A gene or a PPM1A RNA, for example a PPM1A mRNA, or a portion thereof. In some embodiments the PPM1A inhibitor includes a nucleobase sequence that is complementary to a portion of a nucleotide sequence that is shared between PPM1A genes or PPM1A RNAs (for example, PPM1A mRNAs) of multiple species. For example, in some embodiments, the PPM1A inhibitor is a PPM1A antisense therapeutic, for example, a PPM1A antisense oligonucleotide, that is complementary to a nucleotide sequence shared by a human, mouse, and/or primate PPM1A genes or PPM1A mRNAs.

[0366] In some embodiments of the disclosure, the PPM1A gene product is a PPM1A mRNA transcribed from nucleotide 41,932 to nucleotide 42,787 and from nucleotide 44,874 to nucleotide 44,990 of a PPM1A gene sequence (for example the PPM1A gene sequence of NCBI Reference Sequence NG_029698.1 (SEQ ID NO: 1) or a PPM1A coding sequence), or a portion thereof. In some embodiments of the disclosure, the PPM1A gene product is a is a nucleotide sequence that shares at least 80%, at least 81%, at least 82%, at least 83%, at least 84%, at least 85%, at least 86, at least 87%, at least 88%, at least 89%, at least 90%, at least 91%, at least 92%, at least 93%, at least 94%, at least 95%, at least 96%, at least 97%, at least 98%, at least 99%, or 100% identity with a PPM1A mRNA transcribed from nucleotide 41,932 to nucleotide 42,787 and from nucleotide 44,874 to nucleotide 44,990 of a PPM1A gene sequence (for example the PPM1A gene sequence of NCBI Reference Sequence NG_029698.1 (SEQ ID NO: 1) or a PPM1A coding sequence),), or a portion thereof.

[0367] In some embodiments of the disclosure, the PPM1A gene product is a PPM1A mRNA transcribed from any one of nucleotides 8470-8926, 41933-42787, 44874-45990, 49055-49164, 50647-50704, and 51703-58336 of a PPM1A gene sequence (for example the PPM1A gene sequence of NCBI Reference Sequence NG_029698.1 (SEQ ID NO: 1). In some embodiments of the disclosure, the PPM1A gene product is a PPM1A mRNA transcribed from the coding region of a PPM1A gene sequence, such as a coding region including nucleotides 8470-8926, 41933-42787, 44874-45990, 49055-49164, 50647-50704, and 51703-58336 of a PPM1A gene sequence (for example the PPM1A gene sequence of NCBI Reference Sequence NG_029698.1 (SEQ ID NO: 1). In various embodiments, the PPM1A mRNA is PPM1A mRNA transcript variant 1, corresponding to NCBI Reference Sequence NM_021003.5 (SEQ ID NO: 2864).

[0368] In some embodiments of the disclosure, the PPM1A gene product is a PPM1A mRNA transcribed from any one of nucleotides 8470-8926, 9629-9730, 41933-42787, and 44874-47804 of a PPM1A gene sequence (for example the PPM1A gene sequence of NCBI Reference Sequence NG_029698.1 (SEQ ID NO: 1). In some embodiments of the disclosure, the PPM1A gene product is a PPM1A mRNA transcribed from the coding region of a PPM1A gene sequence, such as a coding region including nucleotides 8470-8926, 9629-9730, 41933-42787, and 44874-47804 of a PPM1A gene sequence (for example the PPM1A gene sequence of NCBI Reference Sequence NG_029698.1 (SEQ ID NO: 1). In various embodiments, the PPM1A mRNA is PPM1A mRNA transcript variant 2, corresponding to NCBI Reference Sequence NM_177951.2 (SEQ ID NO: 2865)

[0369] In some embodiments of the disclosure, the PPM1A gene product is a PPM1A mRNA transcribed from any one of nucleotides 4999-5295, 41933-42787, 44874-44990, 49055-49164, 50647-50704, 51703-58336 of a PPM1A gene sequence (for example the PPM1A gene sequence of NCBI Reference Sequence NG_029698.1 (SEQ ID NO: 1). In some embodiments of the disclosure, the PPM1A gene product is a PPM1A mRNA transcribed from the coding region of a PPM1A gene sequence, such as a coding region including nucleotides 4999-5295, 41933-42787, 44874-44990, 49055-49164, 50647-50704, 51703-58336 of a PPM1A gene sequence (for example the PPM1A gene sequence of NCBI Reference Sequence NG_029698.1 (SEQ ID NO: 1). In various embodiments, the PPM1A mRNA is PPM1A mRNA transcript variant 3, corresponding to NCBI Reference Sequence NM_177952.2 (SEQ ID NO: 2866).

[0370] In some embodiments of the disclosure, the PPM1A gene product is a nucleotide sequence including nucleotides 457-1429 of PPM1A mRNA transcript variant 1 (i.e., nucleotides 457-1429 of, for example, PPM1A mRNA transcript variant 1, corresponding to NCBI Reference Sequence NM_021003.5), or a portion thereof. In some embodiments of the disclosure, the PPM1A gene product is a nucleotide sequence that shares at least 80%, at least 81%, at least 82%, at least 83%, at least 84%, at least 85%, at least 86, at least 87%, at least 88%, at least 89%, at least 90%, at least 91%, at least 92%, at least 93%, at least 94%, at least 95%, at least 96%, at least 97%, at least 98%, at least 99%, or 100% identity with nucleotides 457-1429 of PPM1A mRNA transcript variant 1 (i.e., nucleotides 457-1429 of, for example, PPM1A mRNA transcript variant 1, corresponding to NCBI Reference Sequence NM_021003.5), or a portion thereof.

[0371] In some embodiments described herein, a PPM1A gene product is a PPM1A mRNA isoform transcript (for example, PPM1A mRNA transcript variant 1, corresponding to NCBI Reference Sequence NM_021003.5 (SEQ ID NO: 2864)), or a portion thereof. In some embodiments described herein, a PPM1A gene product is a nucleotide sequence that shares at least 80%, at least 81%, at least 82%, at least 83%, at least 84%, at least 85%, at least 86, at least 87%, at least 88%, at least 89%, at least 90%, at least 91%, at least 92%, at least 93%, at least 94%, at least 95%, at least 96%, at least 97%, at least 98%, at least 99%, or 100% identity with a PPM1A mRNA isoform transcript (for example, PPM1A mRNA transcript variant 1, corresponding to NCBI Reference Sequence NM_021003.5 (SEQ ID NO: 2864)), or a portion thereof.

PPM1A mRNA transcript variant 1, corresponding to NCBI Reference Sequence NM_021003.5 (SEQ ID NO: 2864)

| (SEQ ID NO: 2864) | |
|---|---|
| 1 | agaggcggcg gcggcggcgg tggcggcgct agggacggga gcgcgcgcgg gagctagaga |
| 61 | gcagtggtct cggcgctcgt ccggcccgca gcttcgggtc ctcaggcggc tgttgctccg |
| 121 | gaacgggtgg ttggggaggg gggggtgggg ggactctaga cagctgaggc gcgaaagcga |
| 181 | tgagtcctcg gctcttcctc ctccttctcc gggacccgct ctctgcctcc ctctccaacg |
| 241 | cccggatgat ctgagccgcg agggcgccga cagccggggg cccggacgca gcccggctcc |
| 301 | tcccctcctc cgccccttcc ccagcctgac ctggcccgcc gctgcagcgg tgacccctcc |
| 361 | cccggctgcc gccgtcgccg ccgcggtgac cccctccccg gctgccgccg ccgccgcctc |
| 421 | ggccgaccag ggacctgccc gcctgcggct gctccggacc tagaggatca agacataatg |
| 481 | ggagcatttt tagacaagcc aaagatggaa aagcataatg cccaggggca gggtaatggg |
| 541 | ttgcgatatg ggctaagcag catgcaaggc tggcgtgttg aaatggagga tgcacatacg |
| 601 | gctgtgatcg gtttgccaag tggacttgaa tcgtggtcat tctttgctgt gtatgatggg |
| 661 | catgctggtt ctcaggttgc caaatactgc tgtgagcatt tgttagatca catcaccaat |
| 721 | aaccaggatt ttaaagggtc tgcaggagca ccttctgtgg aaaatgtaaa gaatggaatc |
| 781 | agaacaggtt ttctggagat tgatgaacac atgagagtta tgtcagagaa gaaacatggt |
| 841 | gcagatagaa gtgggtcaac agctgtaggt gtcttaattt ctccccaaca tacttatttc |
| 901 | attaactgtg gagactcaag aggtttactt tgtaggaaca ggaaagttca tttcttcaca |
| 961 | caagatcaca aaccaagtaa tccgctggag aaagaacgaa ttcagaatgc aggtggctct |
| 1021 | gtaatgattc agcgtgtgaa tggctctctg gctgtatcga gggcccttgg ggattttgat |
| 1081 | tacaaatgtg tccatggaaa aggtcctact gagcagcttg tctcaccaga gcctgaagtc |
| 1141 | catgatattg aaagatctga agaagatgat cagttcatta tccttgcatg tgatggtatc |
| 1201 | tgggatgtta tgggaaatga agagctctgt gattttgtaa gatccagact tgaagtcact |
| 1261 | gatgaccttg agaaagtttg caatgaagta gtcgacacct gtttgtataa gggaagtcga |
| 1321 | gacaacatga gtgtgatttt gatctgtttt ccaaatgcac ccaaagtatc gccagaagca |
| 1381 | gtgaagaagg aggcagagtt ggacaagtac ctggaatgca gagtagaaga aatcataaag |
| 1441 | aagcaggggg aaggcgtccc cgacttagtc catgtgatgc gcacattagc gagtgagaac |
| 1501 | atccccagcc tcccaccagg gggtgaattg gcaagcaaga ggaatgttat tgaagccgtt |
| 1561 | tacaatagac tgaatcctta caaaaatgac gacactgact ctacatcaac agatgatatg |
| 1621 | tggtaaaact gctcatctag ccatggagtt taccttcacc tccaaaggag agtacagctc |
| 1681 | aactttgttg aaacttttaa catccatcct caactttaag gaaggggata tgacatgggt |
| 1741 | gagaatgatt acatcagaga acttcagcag tacaacagct agcccagaac tgattttttt |
| 1801 | tttttttttt gtaaatttga gacttatgta agcgtgattt caaaccataa ttcgtgttgt |
| 1861 | aaatcagact ccagcaattt ttgttgtatg attttgtttt tttgtaaagt gtaattgtcc |
| 1921 | ttgtacaaaa tgctcatatt taattatgaa ctgctttaaa tcactatcaa agttacaaga |
| 1981 | aatgtttggc ttattgtgtg atgcaacaga tatatagccc tttcaagtca tgttgtgttt |
| 2041 | ggacttgggg ttggaacagg gagagcagca gccatgtcag ctacacgctc aaatgtgcag |
| 2101 | atgattatgg aaaataacct caaaatctta caaagctgaa catccaagga gttattgaaa |
| 2161 | actatcttaa atgttcttgg taggggagtt ggcattgttg ataaagccag tcccttcatt |
| 2221 | taactgtctt tcaggatgtt ccttcgttgt ttccatgagt attgcaggta ataatacagt |
| 2281 | gtattcataa gaatctcaat cttggggcta aatgccttgt ttctttgcac ctcttttcaa |
| 2341 | gtccttacat ttaattacta attgataagc agcagcttcc tacatatagt aggaaactgc |
| 2401 | cacatttttg ctatcatgat tggctgggcc tgctgctgtt cctagtaaga tattctgaat |
| 2461 | tccattttat caataaagct tgatttaaca aacaagaaac ttaatcatgt atgtgtaatt |
| 2521 | cctcttttac cctggccttt taaaacactg tgccgttgta atgagacgtt tctcataggg |
| 2581 | aaagatgtta gtctctttta attggacaac actgtcactc aaggcataga tgaaactttc |
| 2641 | cttccattag aaagactaaa agatttaatt cttggttgta ccttaatcta ttttttaaat |
| 2701 | aggtttcttt caggctgctt atttttcatt aagatgtgta tcagcttgga tttgcctact |
| 2761 | gtttaattaa aatatttatt gtcaaagttt gacaatctaa cactctatgg taggggtgtg |
| 2821 | tgtgtgtgtg tttgtgagtg tgtgtttgcc tgtgattttt aattggccca tgtctttaga |
| 2881 | atccaagtgg ttaagatgta tttgtgattt gaaatatagc atgttgataa tatttagctg |
| 2941 | ttggccttta caaataactt tcaaagctta aggaattgta gatataaaaa taacctaatt |
| 3001 | taatttaggc ttaaattcct ctgattaagc atgtgaaagt aagttttaaa atctgtcgca |
| 3061 | ttgaaaagat tactgttccg tgcccttctg tatttttgtc tctttaggtt gaatattgta |
| 3121 | tttatcacca tgtaatcatt cagtaggcag attcccacta gaaaactgtt gaaatgtaag |
| 3181 | actaaaatac aacattgaat acaaaatcaa aattttgtgt ataaaaacca gtatagtcca |
| 3241 | ttttgttata tttgtttttt ccctaacttg gaaatataca tatttgtata tatagcctta |
| 3301 | aaattaatgt aaagttaggg gagtagtggg gaaagtaatg tgaaatgtct cagatttaag |
| 3361 | tagttaaata ccagcaaaat cttttcatta tccctcttat tttgtgaggt gattaaatgt |
| 3421 | aacttaattg tatttaattt atatcttatt ccagcatgaa tgaggaaaaa ctgaagtact |
| 3481 | atttatattt agaaattcat atcagttgaa attacagaac caattccata cttacaataa |
| 3541 | atacttaatg tctaaatctg tggtagagtg cgaagtatga taatgttcta agttatggct |
| 3601 | ttgcaagcat ctaaatgtgc atttaatgaa taccagtgct tctagtatag actaattacc |
| 3661 | agacatactg gtactgaaag ctaaatccct attataacaa accagttcct taatatttta |
| 3721 | agtagactga caactttagt tccagaaatt gcaaaacttt gaactggact gtgtaatctt |
| 3781 | ttgagatgca aaacttaagt cacaagtaga gtatgtgatg gaaagctgta tttcaaacca |
| 3841 | taacagcata tttagagcct tttttttttg agtctttaaa caagagaaaa ttaaaatatt |
| 3901 | cctgtcaaaa ttattagtat tgaaattagg cttggacacg agagagaacc gtatttgagt |
| 3961 | gatgtgagaa gactaaatct tttccacatg agtcagcact gccatactaa taattttttt |
| 4021 | actataaaaa tacaggaagg aagtatacat tataacagca gactgtgtgt gttcctgatt |
| 4081 | cctggaggta atagtggggg gaaaccaacc atacttttta aaggcacttt tgcacctcta |
| 4141 | ttgtgcactt cattcttgta ccacttaaat tcttcacccc catccccttt ttttgtgcta |
| 4201 | attagcatct cagggcaatg cctcaaaaat gtttgatgtg ttctgttctt tggagggaaa |
| 4261 | aagttcttat gtgatgataa tatagtactc aaaatatact tttatcattt aaatgtctta |
| 4321 | tttgctgcta tgaataggaa ataacatttt gtatagcagg ctctgtttta ccctaacatt |
| 4381 | aaaaaatttc actgatcttt ctttcattaa cagggtagaa tctcctaatt tccactttct |
| 4441 | tgggaatata cttttataga caatagaagc agttctcaat attagcatat actttaaaaa |
| 4501 | atcaaagtga taacttaatt cagctttgga agtatctcaa acatattttt actttatagt |
| 4561 | gcattaactt gcttctagag tacttaatgc aactgctcta gccacttaat tttttatact |
| 4621 | aatctcaaca ttaagaaatt tggattaagt aataaattag ttatgtaatt caagtaatct |
| 4681 | gaattacagc agtactttta gtgatcattc ataggactat atattaaccc agctaataac |
| 4741 | tcagtttttt tacaaaatgt ttcgagtatt attggtaaaa cactgttcta ggctaagcac |
| 4801 | attgggactg taaagaaatg agtagatcct tggcttcaag tttacatctg gacaatttat |
| 4861 | aatctagtgt atgttagtat tataactgga tcactcatca aaaaatatat atatatatct |
| 4921 | attgcccacc tgctatctac caggtactta gctgatcaag gcaggcccct gccctaaaga |
| 4981 | ccttgtttat acttccttta ctcacctgaa aactgttctc cagtttattt tcttctctct |
| 5041 | aaagttaaag agtaattcag aagaaaattt tgcttagcat aagaataaaa ttggactgaa |
| 5101 | gaggcttaag cccattcagt atccttgatt gcatttatcc aacggccttt attcttcctg |
| 4161 | ctgacagcag taactcagag gaataggtag tagatttctg aaaattatcc agccatggaa |
| 5221 | atgtaggtgg ggtttgagtt taaggcattt aaaaatgtaa atatctctag ctaaatttat |
| 5281 | cttaagtaga actctgtgtt tttgtaacac actgccagtg ttaatatcaa attttagcca |
| 5341 | aattattact atgtgtttta atattttaaa ataatttcac tgcccatctt tactggacaa |
| 5401 | actcatttgg agttcaactt gtgatttctg aaagaactga tgaaattggg tactgctttt |
| 5461 | tttctccatt tttcgttttg ttttaatttt gaatttcatg gtatatactt ttagttcaaa |
| 5521 | ctcagctgtt tgtacagtat tgtattagga tttggtatta gaaaagatgt gtaaatatct |
| 5581 | tagtatataa ttgtttctca tttgaggttt ttcttctaag ggaccttaaa gagttttata |
| 5641 | tacttttgct cacagaaact gctggtgaga ttaccatttt ttgagtatct agtcttctag |
| 5701 | tttttctttt aggcattagg aagccttctt tagagttcaa aattttagaa gcctaatttg |
| 5761 | ctcttacttc cttcaattat gtgccatgtg ttttggtttg tatatgtttt aaattgtata |
| 5821 | tttccttgga atatgcttga aatatttaag aatacatttt caaaatgtat aatactgtat |
| 5881 | tgttttgttg atcagaataa taagtctcag ttaaatgttt gttattactg atagtcaaaa |
| 5941 | tgctcaatag aaatgatgag aggcattggt tccaattcat tgtcaaatga acgttttcta |
| 6001 | attttgttca cagattcttt ccctttcgat tgttctgtat gttaagatag tggcttctgc |
| 6061 | tctcactgtt ttcctattta tattactagc aggtaggagt gctaattaga aaaacttaga |
| 6121 | tggtattgaa attacagttg acaacttata tttttatgag atggagaaaa aagattaagt |
| 6181 | tgatataaca acaaagtgga ctttttttct tccttatcct gcacgaaata ttgcccttgt |
| 6241 | ttcctctact ttcctcttgg tgttttctct ttttttcaaa cagaaacagg ccaattccat |
| 6301 | tttcttgagc aagaaagctt agtgtgttac ttcatcaagg ccagctaata ctgtgttaaa |
| 6361 | ccgggctgaa aatgagaaaa cttgggagat ggaggaatgg ggaaatggca gtgggatagg |
| 6421 | tagggaagga ttactcttaa ttgttttaaa agccatagga aagtcttcct tgtacgtggc |
| 6481 | tgtaaattta taagaactat tgtgtcacat aaaccaacaa gaatgaacct ttgctgcttc |
| 6541 | agataatttg atttttccag caaggaaatt aataagttac tgattcttca gcatagaaac |
| 6601 | aactgagaag aattaatgca atgtttcttc actagaaaac ccaacccttc atttcttttc |
| 6661 | attgctccaa aacccagttt tcaactaatg gttttctcat taaactaaat gtttagaaaa |
| 6721 | gttgtttaga gtttttcttt ttcttttaca tagtcctcct gatccagtat aagactattt |
| 6781 | agtaacgtgc atttgtatgg tactatctaa agtaagttag attgatgtaa gagatcgggt |
| 6841 | agctgcggaa caaaattagt tatatcctaa ttaggtacag tgaatgacac aaaatcattt |
| 6901 | tagcaatgct tcttaacctt ttggggtcac aggcgttttg agactgatga atcctaggga |
| 6961 | cttatttacc caggaaaatg cgtatataac atacatatct ccctaaagtt tacaatattg |
| 7021 | tagtggttca tgggccccct ggttaagagc ccattctaaa gtacaatagg gcatcatccc |
| 7081 | ttttcctgca aagcccaaaa gtatatttct agggcatgaa aataacttga gtctatttta |
| 7141 | aggaattgtt tcactctaga ggtagatagg ggacctggct agaatctgac attaaaatat |
| 7201 | actttttaaa aaatattata tttggggtgg ggaaagtgat taaaaggtga aaaaaaaaca |
| 7261 | tagtattcag aagttttgga ggttaatgtc tttctctaag atttgccact ttagaaattc |
| 7321 | aacagaaaag aggtaaaaca gaaatggaat gtatctggaa catttttggc ctccatagtg |
| 7381 | cagatatact atattaacaa gtaatacatt tatttacctg tcagatctcc aggttttaag |
| 7441 | attttgagct ttctagtatt aggattcatt aaatgttcaa ttcatttcat attctaagga |
| 7501 | attaggttat ttacttacta attcaggatg ttaaaataac atccaagtcg gacaaccacc |
| 7561 | accaatgcac acagttaatg agatttctaa aatataataa gtacaatgta acaaacgtat |
| 7621 | agaattttgc atttgttgcc aaaattagat gtttaatgac agcttattta attcccattt |
| 7681 | gtgggacttc tggaacatag aaaccattat cttacctggt tatcccttga ctaaatagca |
| 7741 | tatctgcagg aaaatatctt gtttgtagtg atatgcccca atagtgattg atttcactct |
| 7801 | tgaaatgagt tatatcactt aatttgtata aatgttatga gtggagagac atgtacatgt |
| 7861 | taaaagcatg ttgcattata tattcatttt ttaaactcta taaatgttaa gaataatata |
| 7921 | attgcagaaa tatttttctt aaatacaatg tgtaacaaaa ttctccgtag caactcaccc |
| 7981 | actttgcagt ttatgtgatc cacactttta aagaaattcc ataaatgtat attttgtatt |
| 8041 | atgtattatt tcctggtcca aagaaaatat gtgaattcag ttctaacttt aagaatgtac |
| 8101 | tgtttgtttt caagttcatt gaaaaattgc attcagcctg cgaatggttg cagattgtat |
| 8161 | gttagatgaa aagtagaaat aatttctagt ttggaaaact ggtgccacta aataaacagg |
| 8221 | caattacata a |

[0372] In some embodiments described herein, a PPM1A gene product is a PPM1A mRNA isoform transcript (for example, PPM1A mRNA transcript variant 2, corresponding to NCBI Reference Sequence NM_177951.2 (SEQ ID NO: 2865)), or a portion thereof. In some embodiments described herein, a PPM1A gene product is a nucleotide sequence that shares at least 80%, at least 81%, at least 82%, at least 83%, at least 84%, at least 85%, at least 86, at least 87%, at least 88%, at least 89%, at least 90%, at least 91%, at least 92%, at least 93%, at least 94%, at least 95%, at least 96%, at least 97%, at least 98%, at least 99%, or 100% identity with a PPM1A mRNA isoform transcript (for example, PPM1A mRNA transcript variant 2, corresponding to NCBI Reference Sequence NM_177951.2 (SEQ ID NO: 2865)), or a portion thereof.

[0373] In some embodiments described herein, a PPM1A gene product is a PPM1A mRNA isoform transcript (for example, PPM1A mRNA transcript variant 3, corresponding to NCBI Reference Sequence NM_177952.2 (SEQ ID NO: 2866)), or a portion thereof. In some embodiments described herein, a PPM1A gene product is a nucleotide sequence that shares at least 80%, at least 81%, at least 82%, at least 83%, at least 84%, at least 85%, at least 86, at least 87%, at least 88%, at least 89%, at least 90%, at least 91%, at least 92%, at least 93%, at least 94%, at least 95%, at least 96%, at least 97%, at least 98%, at least 99%, or 100% identity with a PPM1A mRNA isoform transcript (for example, PPM1A mRNA transcript variant 3, corresponding to NCBI Reference Sequence NM_177952.2 (SEQ ID NO: 2866)), or a portion thereof.

[0374] In some embodiments described herein, a PPM1A gene product is a Mus musculus PPM1A mRNA isoform transcript (for example, Mus musculus PPM1A mRNA alpha isoform transcript, corresponding to NCBI Reference Sequence NM_008910.3 (SEQ ID NO: 2867)), or a portion thereof. In some embodiments described herein, a PPM1A gene product is a nucleotide sequence that shares at least 80%, at least 81%, at least 82%, at least 83%, at least 84%, at least 85%, at least 86, at least 87%, at least 88%, at least 89%, at least 90%, at least 91%, at least 92%, at least 93%, at least 94%, at least 95%, at least 96%, at least 97%, at least 98%, at least 99% identity, or 100% identity with a PPM1A mRNA isoform transcript (for example, Mus musculus PPM1A mRNA alpha isoform transcript, corresponding to NCBI Reference Sequence NM_008910.3 (SEQ ID NO: 2867)), or a portion thereof.

[0375] In some embodiments of the disclosure, the PPM1A gene product is a PPM1A mRNA transcript variant other than the PPM1A transcripts described above (e.g., PPM1A mRNA transcript variant 1, corresponding to NCBI Reference Sequence NM_021003.5 (SEQ ID NO: 2864), PPM1A mRNA transcript variant 2, corresponding to NCBI Reference Sequence NM_177951.2 (SEQ ID NO: 2865), PPM1A mRNA transcript variant 3, corresponding to NCBI Reference Sequence NM_177952.2 (SEQ ID NO: 2866), or Mus musculus PPM1A mRNA alpha isoform transcript, corresponding to NCBI Reference Sequence NM_008910.3 (SEQ ID NO: 2867)). In some embodiments, the PPM1A gene product is a nucleotide sequence that shares at least 80%, at least 81%, at least 82%, at least 83%, at least 84%, at least 85%, at least 86, at least 87%, at least 88%, at least 89%, at least 90%, at least 91%, at least 92%, at least 93%, at least 94%, at least 95%, at least 96%, at least 97%, at least 98%, at least 99% identity, or 100% identity with nucleotides homologous to nucleotides of PPM1A mRNA transcript variant 1, corresponding to NCBI Reference Sequence NM_021003.5 (SEQ ID NO: 2864), PPM1A mRNA transcript variant 2, corresponding to NCBI Reference Sequence NM_177951.2 (SEQ ID NO: 2865), PPM1A mRNA transcript variant 3, corresponding to NCBI Reference Sequence NM_177952.2 (SEQ ID NO: 2866), or Mus musculus PPM1A mRNA alpha isoform transcript, corresponding to NCBI Reference Sequence NM_008910.3 (SEQ ID NO: 2867). In some embodiments, the PPM1A gene product is a nucleotide sequence that shares at least 80%, at least 81%, at least 82%, at least 83%, at least 84%, at least 85%, at least 86, at least 87%, at least 88%, at least 89%, at least 90%, at least 91%, at least 92%, at least 93%, at least 94%, at least 95%, at least 96%, at least 97%, at least 98%, at least 99%, or 100% identity with nucleotides homologous to nucleotides 457-1429 of PPM1A mRNA transcript variant 1 (i.e., nucleotides 457-1429 of SEQ ID NO: 2864), or a portion thereof.

[0376] PPM1A AONs Targeting PPM1A Gene Product

[0377] In various embodiments, a PPM1A AON disclosed herein, such as PPM1A AONs with a sequence of any one of SEQ ID NOs: 2-955 or SEQ ID NOs: 1910-2863 or PPM1A Gapmer AONs with a sequence of any one of SEQ ID NOs: 2868-2959, target specific portions of a PPM1A gene product, such as a PPM1A mRNA transcript (e.g., any one of SEQ ID NO: 2864, SEQ ID NO: 2865, SEQ ID NO: 2866, or SEQ ID NO: 2867). In some embodiments, a PPM1A AON may be an oligonucleotide sequence at least 91%, at least 92%, at least 93%, at least 94%, at least 95%, at least 96%, at least 97%, at least 98%, at least 99%, or 100% complementary to a portion of a PPM1A gene product or to PPM1A gene sequence. In some embodiments described herein, a PPM1A AON targets a specific portion of a PPM1A gene product, such as a PPM1A mRNA transcript. Different embodiments of PPM1A mRNA transcripts targeted by PPM1A AONs are described in further detail below. For example, as described herein, a PPM1A AON includes linked nucleosides comprising a nucleobase sequence that is at least 91%, at least 92%, at least 93%, at least 94%, at least 95%, at least 96%, at least 97%, at least 98%, or at least 99% complementary to a PPM1A gene product, for example, a PPM1A mRNA transcript. In some embodiments, a PPM1A AON includes linked nucleosides comprising a nucleobase sequence that is 100% complementary to a PPM1A gene product, for example, a PPM1A mRNA transcript. In some embodiments, a PPM1A AON includes linked nucleosides comprising a nucleobase sequence that is at least 91%, at least 92%, at least 93%, at least 94%, at least 95%, at least 96%, at least 97%, at least 98%, or at least 99% complementary to a nucleotide sequence of an exon of a PPM1A gene sequence or a PPM1A mRNA sequence. In some embodiments, a PPM1A AON includes linked nucleosides comprising a nucleobase sequence that is 100% complementary to a nucleotide sequence of an exon of a PPM1A gene sequence or a PPM1A mRNA sequence. In some embodiments, a PPM1A AON includes linked nucleosides comprising a nucleobase sequence that is at least 91%, at least 92%, at least 93%, at least 94%, at least 95%, at least 96%, at least 97%, at least 98%, or at least 99% complementary to a nucleotide sequence of an untranslated region (UTR) of a PPM1A mRNA sequence, for example a 5′ UTR or a 3′ UTR of a PPM1A mRNA sequence. In some embodiments, a PPM1A AON includes linked nucleosides comprising a nucleobase sequence that is 100% complementary to a nucleotide sequence of an untranslated region (UTR) of a PPM1A mRNA sequence, for example a 5′ UTR or a 3′ UTR of a PPM1A mRNA sequence.

[0378] In some embodiments, a PPM1A AON targets a specific portion of the PPM1A gene product, the specific portion of the PPM1A gene product having a length of 10 nucleobases. In some embodiments, a PPM1A AON targets a specific portion of the PPM1A gene product, the specific portion of the PPM1A gene product having a length of 11, 12, 13, 14, 15, 16, 17, 18, 19, 20, 21, 22, 23, 24, or 25 nucleobases in length.

[0379] In some embodiments, a PPM1A AON disclosed herein target a contiguous nucleobase portion of a PPM1A gene product, such as a PPM1A mRNA transcript (e.g., any one of SEQ ID NO: 2864, SEQ ID NO: 2865, SEQ ID NO: 2866, or SEQ ID NO: 2867). In various embodiments, a PPM1A AON is at least 90% complementary to a contiguous 15 to 50 nucleobase portion of a PPM1A mRNA transcript (e.g., any one of SEQ ID NO: 2864, SEQ ID NO: 2865, SEQ ID NO: 2866, or SEQ ID NO: 2867).). In various embodiments, a PPM1A AON is at least 91%, at least 92%, at least 93%, at least 94%, at least 95%, at least 96%, at least 97%, at least 98%, at least 99%, or is 100% complementary to a contiguous 15 to 50 nucleobase portion of a PPM1A mRNA transcript (e.g., any one of SEQ ID NO: 2864, SEQ ID NO: 2865, SEQ ID NO: 2866, or SEQ ID NO: 2867). In various embodiments, a PPM1A AON is at least 91%, at least 92%, at least 93%, at least 94%, at least 95%, at least 96%, at least 97%, at least 98%, at least 99%, or is 100% complementary to a contiguous 16 to 45 nucleobase portion, 17 to 35 nucleobase portion, 18 to 30 nucleobase portion, 19 to 28 nucleobase portion, or 20 to 25 nucleobase portion of a PPM1A mRNA transcript (e.g., any one of SEQ ID NO: 2864, SEQ ID NO: 2865, SEQ ID NO: 2866, or SEQ ID NO: 2867).

[0380] In some embodiments, a PPM1A AON targets a specific portion of the PPM1A gene product, the specific portion of the PPM1A gene product comprising nucleotides 457-1429 of PPM1A mRNA transcript variant 1 (SEQ ID NO: 2864). In some embodiments, a PPM1A AON targets a specific portion of nucleotides 457-1429 of PPM1A mRNA transcript variant 1 (SEQ ID NO: 2864). In one embodiment, a PPM1A AON includes linked nucleosides with a nucleobase sequence having a portion of at least 10 contiguous nucleobases that is at least 90% complementary to an equal length portion of nucleobases in nucleotides 457-1429 of PPM1A mRNA transcript variant 1 (SEQ ID NO: 2864). In one embodiment, a PPM1A AON includes linked nucleosides with a nucleobase sequence having a portion of at least 10, at least 11, at least 12, at least 13, at least 14, at least 15, at least 16, at least 17, at least 18, or at least 19 contiguous nucleobases that is at least 91%, at least 92%, at least 93%, at least 94%, at least 95%, at least 96%, at least 97%, at least 98%, at least 99%, or is 100% complementary to an equal length portion of nucleobases in nucleotides 457-1429 of PPM1A mRNA transcript variant 1 (SEQ ID NO: 2864).

[0381] In various embodiments, a PPM1A AON targets any one of positions 542-814, 895-1006, 1025-1117, or 1361-1407 of SEQ ID NO: 2864. In one embodiment, a PPM1A AON includes linked nucleosides with a nucleobase sequence having a portion of at least 10 contiguous nucleobases that is at least 90% complementary to an equal length portion of nucleobases in positions 542-814, 895-1006, 1025-1117, or 1361-1407 of SEQ ID NO: 2864. In one embodiment, a PPM1A AON includes linked nucleosides with a nucleobase sequence having a portion of at least 10, at least 11, at least 12, at least 13, at least 14, at least 15, at least 16, at least 17, at least 18, or at least 19 contiguous nucleobases that is at least 91%, at least 92%, at least 93%, at least 94%, at least 95%, at least 96%, at least 97%, at least 98%, at least 99%, or is 100% complementary to an equal length portion of nucleobases in positions 542-814, 895-1006, 1025-1117, or 1361-1407 of SEQ ID NO: 2864.

[0382] In various embodiments, a PPM1A AON targets any one of positions 542-561, 555-574, 559-578, 599-618, 602-621, 603-622, 604-623, 605-624, 606-625, 607-626, 608-627, 609-628, 625-644, 642-661, 644-663, 646-665, 648-667, 650-669, 652-671, 655-674, 656-675, 708-727, 709-728, 794-813, 795-814, 895-914, 900-919, 905-924, 910-929, 915-934, 962-981, 967-986, 972-991, 977-996, 987-1006, 1025-1044, 1030-1049, 1034-1053, 1040-1059, 1045-1064, 1098-1117, 1361-1380, 1366-1385, 1371-1390, 1378-1397, and 1386-1405 of SEQ ID NO: 2864. In one embodiment, a PPM1A AON includes linked nucleosides with a nucleobase sequence having a portion of at least 10 contiguous nucleobases that is at least 90% complementary to an equal length portion of nucleobases in positions 542-561, 555-574, 559-578, 599-618, 602-621, 603-622, 604-623, 605-624, 606-625, 607-626, 608-627, 609-628, 625-644, 642-661, 644-663, 646-665, 648-667, 650-669, 652-671, 655-674, 656-675, 708-727, 709-728, 794-813, 795-814, 895-914, 900-919, 905-924, 910-929, 915-934, 962-981, 967-986, 972-991, 977-996, 987-1006, 1025-1044, 1030-1049, 1034-1053, 1040-1059, 1045-1064, 1098-1117, 1361-1380, 1366-1385, 1371-1390, 1378-1397, and 1386-1405 of SEQ ID NO: 2864. In one embodiment, a PPM1A AON includes linked nucleosides with a nucleobase sequence having a portion of at least 10, at least 11, at least 12, at least 13, at least 14, at least 15, at least 16, at least 17, at least 18, or at least 19 contiguous nucleobases that is at least 91%, at least 92%, at least 93%, at least 94%, at least 95%, at least 96%, at least 97%, at least 98%, at least 99%, or is 100% complementary to an equal length portion of nucleobases in positions 542-561, 555-574, 559-578, 599-618, 602-621, 603-622, 604-623, 605-624, 606-625, 607-626, 608-627, 609-628, 625-644, 642-661, 644-663, 646-665, 648-667, 650-669, 652-671, 655-674, 656-675, 708-727, 709-728, 794-813, 795-814, 895-914, 900-919, 905-924, 910-929, 915-934, 962-981, 967-986, 972-991, 977-996, 987-1006, 1025-1044, 1030-1049, 1034-1053, 1040-1059, 1045-1064, 1098-1117, 1361-1380, 1366-1385, 1371-1390, 1378-1397, and 1386-1405 of SEQ ID NO: 2864.

[0383] Nuclease-Mediated PPM1A Inhibition

[0384] In one aspect, the present disclosure provides a nuclease to reduce PPM1A expression. In some embodiments, the nuclease can be a Zinc Finger nuclease (ZFN), a meganuclease, a transcription activator-like effector nuclease (TALEN), or a clustered regularly interspaced short palindromic repeats (CRISPR) associated protein.

[0385] In certain embodiments, PPM1A inhibition is achieved using zinc finger nucleases (ZFNs). Synthetic ZFNs are composed of a zinc finger binding domain fused with, e.g., a FokI DNA cleavage domain. ZFNs can be designed/engineered for editing the genome of a cell, including, but not limited to, knock-out or knock-in gene expression, in a wide range of organisms. A meganuclease, a TALEN, or a CRISPR associated protein can be used for genome engineering in cells of a patient suffering from or at risk of a neurological disease, including neurons, for example, motor neurons, and other cells of the nervous system. The described reagents can be used to target promoters, protein-encoding regions (exons), introns, 5′ and 3′ UTRs, and more.

[0386] CRISPR genome editing typically comprises two distinct components: (1) a guide RNA and (2) an endonuclease, specifically a CRISPR associated (Cas) nuclease (e.g., Cas9). The guide RNA is a combination of the endogenous bacterial crRNA and tracrRNA into a single chimeric guide RNA (gRNA) transcript. Without being bound by theory, it is believed that when gRNA and the Cas are expressed in the cell, the genomic target sequence can be modified or permanently disrupted.

[0387] A gRNA/Cas complex can be recruited to a target sequence, for example, the PPM1A gene, by base-pairing between the gRNA sequence and the complement to the target DNA sequence in the PPM1A gene. An appropriate genomic target sequence contains a Protospacer Adjacent Motif (PAM) sequence immediately following the target sequence. The binding of the gRNA/Cas complex localizes the Cas to the PPM1A target sequence, allowing wild-type Cas to cut both strands of DNA, causing a double strand break. The double strand break is repaired through one of two general repair pathways: (1) the non-homologous end joining DNA repair pathway or (2) the homology directed repair pathway. The non-homologous repair pathway can result in insertions/deletions at the double strand break that can lead to frameshifts and/or premature stop codons, effectively disrupting the open reading frame of the target gene. The homology directed repair pathway requires the presence of a repair template, which is used to fix the double strand break.

[0388] In certain embodiments, PPM1A expression is reduced using CRISPR genome editing. In some embodiments, a gRNA pair is used to target a PPM1A gene to reduce and/or eliminate expression of PPM1A. In certain embodiments, one gRNA pair is used to reduce expression of PPM1A. In certain other embodiments, multiple gRNA pairs are used to reduce expression of PPM1A. gRNA pairs can be designed using known techniques and based on the PPM1A gene sequence. In certain embodiments, gRNA sequences may include modifications such as 2′ O-methyl analogs and 3′ phosphorothioate internucleotide linkages in the terminal three nucleotides on both 5′ and 3′ ends of the gRNA.

[0389] Neurological Diseases

[0390] Methods described herein may be used to treat neurological diseases including, but not limited to, amyotrophic lateral sclerosis (ALS), frontotemporal dementia (FTD), ALS with FTD, Alzheimer's disease (AD), Parkinson's disease (PD), Huntington's disease, Brachial plexus injuries, peripheral nerve injuries, progressive supranuclear palsy (PSP), brain trauma, spinal cord injury, corticobasal degeneration (CBD) and/or neuropathies such a chemotherapy induced neuropathy, Spinocerebellar ataxia (SCA), Niemann-Pick disease type C (NPC), Charcot-Marie-Tooth Disease (CMT), Mucopolysaccharidosis type II (MPSIIA), Mucolipidosis IV, GM1 gangliosidosis, Sporadic inclusion body myositis (sIBM), Henoch-Schonlein purpura (HSP), and Gaucher's disease.

[0391] Motor neuron diseases are a group of diseases characterized by loss of function of motor neurons that coordinate voluntary movement of muscles by the brain. Motor neuron diseases may affect upper and/or lower motor neurons, and may have sporadic or familial origins. Motor neuron diseases include amyotrophic lateral sclerosis (ALS or Lou Gehrig's disease), progressive bulbar palsy, pseudobulbar palsy, progressive muscular atrophy, primary lateral sclerosis, spinal muscular atrophy, post-polio syndrome, and ALS with frontotemporal dementia.

[0392] Symptoms of motor neuron diseases include muscle decay or weakening, muscle pain, spasms, slurred speech, difficulty swallowing, loss of muscle control, joint pain, stiff limbs, difficulty breathing, drooling, and complete loss of muscle control, including over basic functions such as breathing, swallowing, eating, speaking, and limb movement. These symptoms are also sometimes accompanied by depression, loss of memory, difficulty with planning, language deficits, altered behavior, and difficulty assessing spatial relationships and/or changes in personality.

[0393] Motor neuron diseases can be assessed and diagnosed by a clinician of skill, for example, a neurologist, using various tools and tests. For example, the presence or risk of developing a motor neuron disease can be assessed or diagnosed using blood and urine tests (for example, tests that assay for the presence of creatinine kinase), magnetic resonance imaging (MRI), electromyography (EMG), nerve conduction study (NCS), spinal tap, lumbar puncture, and/or muscle biopsy. Motor neuron diseases can be diagnosed with the aid of a physical exam and/or a neurological exam to assess motor and sensory skills, nerve function, hearing and speech, vision, coordination and balance, mental status, and changes in mood or behavior.

[0394] Amyotrophic Lateral Sclerosis

[0395] ALS is a progressive motor neuron disease that disrupts signals to all voluntary muscles. ALS results in atrophy of both upper and lower motor neurons. Symptoms of ALS include weakening and wasting of the bulbar muscles, general and bilateral loss of strength, spasticity, muscle spasms, muscle cramps, fasciculations, slurred speech, and difficulty breathing or loss of ability to breathe. Some individuals with ALS also suffer from cognitive decline. At the molecular level, ALS is characterized by protein and RNA aggregates in the cytoplasm of motor neurons, including aggregates of the RNA-binding protein TDP43.

[0396] ALS is most common in males above 40 years of age, although it can also occur in women and children. Risk of ALS is also heightened in individuals who smoke, are exposed to chemicals such as lead, or who have served in the military. Most instances of ALS are sporadic, while only about 10% of cases are familial. Causes of ALS include sporadic or inherited genetic mutations, high levels of glutamate, protein mishandling. Genetic mutations associated with ALS include mutations in the genes SOD1, C9orf72, TARDP, FUS, ANG, ATXN2, CHCHD10, CHMP2B, DCTN1, ERBB4, FIG4, HNRPA1, MATR3, NEFH, OPTN, PFN1, PRPH, SETX, SIGMAR1, SMN1, SPG11, SQSTM1, TBK1, TRPM7, TUBA4A, UBQLN2, VAPB, and VCP.

[0397] Frontotemporal Dementia

[0398] Frontotemporal dementia (FTD) is a form of dementia that affects the frontal and temporal lobes of the brain. It has an earlier average age of onset than Alzheimer's disease—40 years of age. Symptoms of FTD include extreme changes in behavior and personality, speech and language problems, and movement-related symptoms such as tremor, rigidity, muscle spasm, weakness, and difficulty swallowing. Subtypes of FTD include behavior variant frontotemporal dementia (bvFTD), characterized by changes in personality and behavior) and primary progressive aphasia (PPA), which affects language skills, speaking, writing and comprehension. FTD is associated with tau protein accumulation (Pick bodies) and function of altered TDP43 function. About 30% of cases of FTD are familial, and no other risk factors other than family history of the disease are known. Genetic mutations associated with FTD include mutations in the genes C9orf72, Progranulin (GRN), microtubule-associated protein tau (MAPT), UBQLN2, VPC, CHMP2B, TARDP, FUS, ITM2B, CHCHD10, SQSTM1, PSEN1, PSEN2, CTSF, CYP27A1, TBK1 and TBP.

[0399] Amyotrophic lateral sclerosis with frontotemporal dementia (ALS with FTD) is a clinical syndrome in which FTD and ALS occur in the same individual. Interestingly, mutations in C9orf72 are the most common cause of familial forms of ALS and FTD. Additionally, mutations in TBK1, VCP, SQSTMI, UBQLN2 and CHMP2B are also associated with ALS with FTD. Symptoms of ALS with FTD include dramatic changes in personality, as well as muscle weakness, muscle atrophy, fasciculations, spasticity, dysarthria, dysphagia, and degeneration of the spinal cord, motor neurons, and frontal and temporal lobes of the brain. At the molecular level, ALS with FTD is characterized by the accumulation of TDP-43 and/or FUS proteins. TBK1 mutations are associated with ALS, FTD, and ALS with FTD.

[0400] TBK1 and RIPK1 Function

[0401] In one aspect, methods described herein include exposing a cell to a PPM1A inhibitor to modify the activity, function, or other characteristics of a gene or a gene product, for example, an mRNA or protein. For example, methods described herein include a method of increasing or decreasing or inhibiting the activity, function, or other characteristics of a gene or a gene product. For example, described herein is a method of increasing phosphorylation of a residue of TANK-binding kinase 1 (also known as Serine/threonine-protein kinase TBK1; “TBK1”). For example, described herein is a method of increasing TBK1 serine residue 172 (ser172) phosphorylation in a cell, where the method includes exposing the cell to a PPM1A inhibitor. In some embodiments, TBK1 ser172 phosphorylation is increased in a cell of a patient suffering from ALS, FTD, or ALS with FTD. In some embodiments, the method of increasing TBK1 ser172 phosphorylation includes exposing a cell to a PPM1A antisense oligonucleotide of any one of SEQ ID NOs: 2-955, SEQ ID NOs: 1910-2863, SEQ ID NOs: 2868-2913, and SEQ ID NOs: 2914-2959.

[0402] Also described herein is a method of increasing TBK1 function in a cell, where the method includes exposing the cell to a PPM1A inhibitor. For example, described herein is a method of increasing TBK1 function in a cell, where the method includes exposing the cell to a PPM1A inhibitor. In some embodiments, TBK1 function is increased in a cell of a patient suffering from ALS, FTD, or ALS with FTD. In some embodiments, the method of increasing TBK1 function includes exposing a cell to a PPM1A antisense oligonucleotide of any one of SEQ ID NOs: 2-955, SEQ ID NOs: 1910-2863, SEQ ID NOs: 2868-2913, and SEQ ID NOs: 2914-2959.

[0403] Tank-binding kinase 1 (TBK1) is an IKK family of kinases that induces type-1 interferon activity and plays a major role in the phosphorylation of autophagy adaptors. Mutations in TBK1 are thought to result in impaired autophagy and contribute to the accumulation of protein aggregates and ALS pathology. At least 92 mutations in TBK1 have been identified in patients with ALS, FTD, or ALS with FTD (see Oakes et al., (2017) “TBK1: a new player in ALS linking autophagy and neuroinflammation” Molecular Brain 10:5, pg. 1-10). Furthermore, along with mutations in C9orf72, OPTN, SQSTM1/p62, UBQLN2, and TDP43, mutations in TBK1 account for approximately 15% of ALS and FTD patients. Furthermore, TBK1 haploinsufficiency associated with loss of function mutations has been identified as a major driver of familial ALS (see Freischmidt et al., (2015) “Haploinsufficiency of TBK1 causes familial ALS and fronto-temporal dementia” Nature Neuroscience, 18(5):631-6).

[0404] Autophagy is a process by which ubiquitinated proteins and damaged organelles are degraded and recycled. Abnormal protein aggregates are a hallmark of ALS pathology, and mutations in several genes involved in regulating autophagy are associated with ALS (for example, SQSTM1, SOD1, OPTN, VCP, UBQLN2, and TBK1). Thus, disruption of autophagy appears to contribute to ALS pathology.

[0405] Phosphorylation of residue Ser172 of TBK1 results in conformational changes in TBK1, that allow substrate binding by the protein's kinase domain. TBK1 phosphorylates a number of autophagy adaptors, and several TBK1 mutations identified in ALS patients inhibit the ability of TBK1 to phosphorylate these adaptors. Other TBK1 mutations result in decreased mRNA and protein levels. Additionally, individuals carrying mutations in TBK1 also display TDP43-positive aggregates in various brain regions. Thus, TBK1 mutations may result in decreased autophagy and accumulation of protein aggregates in motor neurons.

[0406] PPM1A is a member of the PP2C family of Ser/Thr protein phosphatases. PP2C family members are negative regulators of cellular stress-response pathways and are involved in regulating the cell-cycle and NF-κB pathways. PPM1A also dephosphorylates and inactivates TBK1. In particular, PPM1A dephosphorylates Ser172 of TBK1. Activated TBK1 can phosphorylate RIPK1 in such a manner that RIPK1 is deactivated. Thus PPM1A indirectly inactivates RIPK1

[0407] The present disclosure is based in part on the finding that increasing TBK1 activity, for example, increasing TBK1 activity in an individual or the cell of an individual that suffering from TBK1 haploinsufficiency, can be used as a mechanism to treat neurological diseases, for example, amyotrophic lateral sclerosis (ALS), frontotemporal dementia (FTD), ALS with FTD, Alzheimer's disease (AD), Parkinson's disease (PD), Huntington's disease, Brachial plexus injuries, peripheral nerve injuries, progressive supranuclear palsy (PSP), brain trauma, spinal cord injury, corticobasal degeneration (CBD) and/or neuropathies such a chemotherapy induced neuropathy, Spinocerebellar ataxia (SCA), Niemann-Pick disease type C (NPC), Charcot-Marie-Tooth Disease (CMT), Mucopolysaccharidosis type II (MPSIIA), Mucolipidosis IV, GM1 gangliosidosis, Sporadic inclusion body myositis (sIBM), Henoch-Schonlein purpura (HSP), or Gaucher's disease.

[0408] The disclosure is also based in part on the finding that increasing TBK1 activity, for example, increasing residual TBK1 activity in an individual and/or a cell of an individual suffering from TBK1 haploinsufficiency, can be achieved by increasing the amount of phosphorylated TBK1, for example, by increasing the amount of phosphorylated Ser172 TBK1, for example, an individual and/or a cell of an individual suffering from TBK1 haploinsufficiency. The disclosure is also based in part on the finding that increasing TBK1 activity, for example, increasing residual TBK1 activity in an individual and/or a cell of an individual suffering from TBK1 haploinsufficiency, can be achieved by increasing the ratio of phosphorylated TBK1 to total TBK1, for example, increasing the ratio of phosphorylated Ser172 TBK1 to unphosphorylated Ser172 TBK1, for example, in an individual and/or a cell of an individual suffering from TBK1 haploinsufficiency.

[0409] The disclosure is further based in part on the finding that increasing TBK1 activity (for example, increasing residual TBK1 activity in an individual and/or a cell of an individual suffering from TBK1 haploinsufficiency), increasing the amount of phosphorylated TBK1 (for example, increasing the amount of phosphorylated Ser172 TBK1, for example, in an individual and/or a cell of an individual suffering from TBK1 haploinsufficiency), and/or increasing the ratio of phosphorylated TBK1 to unphosphorylated TBK1 (for example, increasing the ratio of phosphorylated Ser172 TBK1 to unphosphorylated Ser172 TBK1, for example, in an individual and/or a cell of an individual suffering from TBK1 haploinsufficiency) can be achieved by inhibiting PPM1A activity and/or decreasing PPM1A protein levels, for example, in an individual and/or a cell of an individual suffering from a TBK1 haploinsufficiency. Without being bound by theory, it is believed that inhibiting PPM1A activity and/or decreasing PPM1A protein levels can be achieved by administering to a patient or a cell of a patient, a PPM1A inhibitor, for example, a PPM1A inhibitor described herein. In particular embodiments, the disclosure provides methods of inhibiting PPM1A activity and/or decreasing PPM1A protein amounts by administering to a patient or a cell of a patient (for example, a patient suffering from a neurological disease or a cell of a patient suffering from a neurological disease, for example, amyotrophic lateral sclerosis (ALS), frontotemporal dementia (FTD), ALS with FTD, Alzheimer's disease (AD), Parkinson's disease (PD), Huntington's disease, Brachial plexus injuries, peripheral nerve injuries, progressive supranuclear palsy (PSP), brain trauma, spinal cord injury, corticobasal degeneration (CBD) and/or neuropathies such a chemotherapy induced neuropathy, Spinocerebellar ataxia (SCA), Niemann-Pick disease type C (NPC), Charcot-Marie-Tooth Disease (CMT), Mucopolysaccharidosis type II (MPSIIA), Mucolipidosis IV, GM1 gangliosidosis, Sporadic inclusion body myositis (sIBM), Henoch-Schonlein purpura (HSP), or Gaucher's disease) a PPM1A AON, for example, a PPM1A AON comprising the nucleotide sequence of any one of SEQ ID NOs: 2-955, SEQ ID NOs: 1910-2863, SEQ ID NOs: 2868-2913, and SEQ ID NOs: 2914-2959.

[0410] Additionally disclosed herein is a method of modulating activity of Receptor Interacting Serine/Threonine Kinase 1 (also known as “RIPK1”). For example, described herein is a method of modulating RIPK1 activity in a cell, where the method includes exposing the cell to a PPM1A inhibitor. In various embodiments, modulating activity of RIPK1 can be useful for treating various diseases, including acute neuronal injury, multiple sclerosis, ALS, Alzheimer's Disease, Lysosomal Storage Diseases, Parkinson's Disease, and other human central nervous system diseases. In some embodiments, RIPK1 activity is modulated in a cell of a patient suffering from ALS, FTD, or ALS with FTD. In some embodiments, the method of modulating RIPK1 activity includes exposing a cell to a PPM1A antisense oligonucleotide of any one of SEQ ID NOs: 2-955, SEQ ID NOs: 1910-2863, SEQ ID NOs: 2868-2913, and SEQ ID NOs: 2914-2959.

[0411] TBK1 regulates RIPK1 through direct phosphorylation on multiple sites including Thr189 to suppress RIPK1 kinase activity by blocking the interaction with its substrates. Degterev, A. et al Targeting RIPK1 for the Treatment of Human Diseases, PNAS (2019), 116(20) 9714-9722 Therefore, increasing TBK1 function by increasing phosphorylation of a residue of TANK-binding kinase 1 can result in suppression of RIPK1 activity.

[0412] Methods of Treatment

[0413] The disclosure contemplates, in part, treating neurological diseases (for example, amyotrophic lateral sclerosis (ALS), frontotemporal dementia (FTD), ALS with FTD, Alzheimer's disease (AD), Parkinson's disease (PD), Huntington's disease, Brachial plexus injuries, peripheral nerve injuries, progressive supranuclear palsy (PSP), brain trauma, spinal cord injury, corticobasal degeneration (CBD) and/or neuropathies such a chemotherapy induced neuropathy, Spinocerebellar ataxia (SCA), Niemann-Pick disease type C (NPC), Charcot-Marie-Tooth Disease (CMT), Mucopolysaccharidosis type II (MPSIIA), Mucolipidosis IV, GM1 gangliosidosis, Sporadic inclusion body myositis (sIBM), Henoch-Schonlein purpura (HSP), or Gaucher's disease) in a patient in need thereof comprising administering a disclosed PPM1A inhibitor, for example, a PPM1A AON. In some embodiments, provided herein are methods for treatment of a neurological disease in a patient in need thereof, comprising administering a disclosed PPM1A inhibitor. In some embodiments of the disclosure, an effective amount of a disclosed PPM1A inhibitor may be administered to a patient in need thereof to treat a neurological disease, for example, to restore autophagy in cells of a patient suffering from a neurological disease, and/or to reduce or inhibit PPM1A. In some embodiments of the disclosure, an effective amount of a disclosed PPM1A inhibitor may be administered to a patient in need thereof to increase TBK1 phosphorylation (for example TBK1 ser172 phosphorylation) in a cell and/or to increase TBK1 function (for example, TBK1 kinase function) in a cell.

[0414] In some embodiments, methods of treating a neurological disease associated with impaired autophagy and/or protein aggregation (for example, TDP-43 protein aggregation, for example, in motor neurons) in a patient in need thereof are provided comprising administering a disclosed compound. In some embodiments, treating a neurological disease comprises at least ameliorating or reducing one symptom associated with the neurological disease (for example, reducing muscle weakness in a patient with ALS). Methods of treating a neurological disease (for example, amyotrophic lateral sclerosis (ALS), frontotemporal dementia (FTD), ALS with FTD, Alzheimer's disease (AD), Parkinson's disease (PD), Huntington's disease, Brachial plexus injuries, peripheral nerve injuries, progressive supranuclear palsy (PSP), brain trauma, spinal cord injury, corticobasal degeneration (CBD) and/or neuropathies such a chemotherapy induced neuropathy, Spinocerebellar ataxia (SCA), Niemann-Pick disease type C (NPC), Charcot-Marie-Tooth Disease (CMT), Mucopolysaccharidosis type II (MPSIIA), Mucolipidosis IV, GM1 gangliosidosis, Sporadic inclusion body myositis (sIBM), Henoch-Schonlein purpura (HSP), or Gaucher's disease) in a patient suffering therefrom are provided, that include administering a disclosed PPM1A inhibitor, for example, a PPM1A AON. In some embodiments, methods of slowing the progression of a neurological disease, for example, a motor neuron disease, are provided.

[0415] Provided herein are methods of treating, reducing the risk of developing, or delaying the onset of a neurological disease in a subject in need thereof comprising administering a disclosed PPM1A inhibitor, for example, a PPM1A AON. The methods include for example, treating a subject at risk of developing a neurological disease; e.g., administering to the subject an effective amount of a disclosed PPM1A AON. Neurological diseases that can be treated in this manner include amyotrophic lateral sclerosis (ALS), frontotemporal dementia (FTD), ALS with FTD, Alzheimer's disease (AD), Parkinson's disease (PD), Huntington's disease, Brachial plexus injuries, peripheral nerve injuries, progressive supranuclear palsy (PSP), brain trauma, spinal cord injury, corticobasal degeneration (CBD) and/or neuropathies such a chemotherapy induced neuropathy, Spinocerebellar ataxia (SCA), Niemann-Pick disease type C (NPC), Charcot-Marie-Tooth Disease (CMT), Mucopolysaccharidosis type II (MPSIIA), Mucolipidosis IV, GM1 gangliosidosis, Sporadic inclusion body myositis (sIBM), Henoch-Schonlein purpura (HSP), or Gaucher's disease.

[0416] Methods of preventing or treating neurological diseases (for example, amyotrophic lateral sclerosis (ALS), frontotemporal dementia (FTD), ALS with FTD, Alzheimer's disease (AD), Parkinson's disease (PD), Huntington's disease, Brachial plexus injuries, peripheral nerve injuries, progressive supranuclear palsy (PSP), brain trauma, spinal cord injury, corticobasal degeneration (CBD) and/or neuropathies such a chemotherapy induced neuropathy, Spinocerebellar ataxia (SCA), Niemann-Pick disease type C (NPC), Charcot-Marie-Tooth Disease (CMT), Mucopolysaccharidosis type II (MPSIIA), Mucolipidosis IV, GM1 gangliosidosis, Sporadic inclusion body myositis (sIBM), Henoch-Schonlein purpura (HSP), or Gaucher's disease) form part of this disclosure. Such methods may comprise administering to a patient in need thereof or a patient at risk, a pharmaceutical preparation comprising an PPM1A AON such as a PPM1A AON disclosed herein. For example, a method of preventing or treating a neurological disease is provided comprising administering to a patient in need thereof a PPM1A AON disclosed herein.

[0417] Patients treated using an above method may experience a reduction of at least about 5%, 10%, 20%, 30%, 40%, 50%, 60%, 70%, 80%, 90%, or even 95% in the amount of PPM1A in a target cell (for example, a motor neuron) after administering PPM1A inhibitor, after e.g. 1 day, 2 days, 1 week, 2 weeks, 3 weeks, 4 weeks, 5 weeks, 6 weeks, 7 weeks, 8 weeks, 1 month, 2 months, 3, months, 4 months, 5, months, or 6 months or more. Administering such PPM1A inhibitor may be on, e.g., at least a daily basis. The PPM1A inhibitor may be administered orally. In some embodiments, the PPM1A inhibitor is administered intrathecally or intracisternally. For example, in an embodiment described herein, a PPM1A inhibitor is administered intrathecally or intracisternally about every 3 months. The delay or worsening of clinical manifestation of a neurological disease in a patient as a consequence of administering a PPM1A inhibitor disclosed here may be at least e.g., 6 months, 1 year, 18 months or even 2 years or more as compared to a patient who is not administered a PPM1A inhibitor such as one disclosed herein.

[0418] In another aspect, the disclosure provides methods of preventing, ameliorating, and/or treating a neurological disease, for example, a motor neuron disease. For example described herein are methods of preventing, ameliorating, and/or treating ALS, FTD, and ALS with FTD. In some embodiments, the disclosure provides a method of treating a neurological disease in a patient, for example, a patient in need of treatment of a neurological disease, where the method comprises administering to the patient a PPM1A inhibitor. In some embodiments, the neurological disease is selected from the group consisting of amyotrophic lateral sclerosis (ALS), frontotemporal dementia (FTD), ALS with FTD, Alzheimer's disease (AD), Parkinson's disease (PD), Huntington's disease, Brachial plexus injuries, peripheral nerve injuries, progressive supranuclear palsy (PSP), brain trauma, spinal cord injury, corticobasal degeneration (CBD) and/or neuropathies such a chemotherapy induced neuropathy, Spinocerebellar ataxia (SCA), Niemann-Pick disease type C (NPC), Charcot-Marie-Tooth Disease (CMT), Mucopolysaccharidosis type II (MPSIIA), Mucolipidosis IV, GM1 gangliosidosis, Sporadic inclusion body myositis (sIBM), Henoch-Schonlein purpura (HSP), and Gaucher's disease.

[0419] In some embodiments, the patient is a mammal, for example, a human, a primate, a dog, a cat, a horse, a cow, a goat, a sheep, a mouse, or a rat. In particular embodiments, the patient is a human patient, for example, a human patient in need of treatment of a neurological disease, for example, ALS, FTD, or ALS with FTD. In some embodiments, the patient is a patient at risk of developing a neurological disease, for example, ALS, FTD, or ALS with FTD. In some embodiments, the patient is a patient suffering from a neurological disease, for example, ALS, FTD, or ALS with FTD. In some embodiments, the patient is a patient exhibiting symptoms associated with a neurological disease, for example, ALS, FTD, or ALS with FTD.

[0420] In another aspect, described herein are methods of modifying or restoring cellular function or activity, for example, cellular function or activity of a motor neuron. For example, described herein is a method of modifying or restoring cellular function or activity of a motor neuron of a patient at risk of or suffering from a neurological disease, for example, amyotrophic lateral sclerosis (ALS), frontotemporal dementia (FTD), ALS with FTD, Alzheimer's disease (AD), Parkinson's disease (PD), Huntington's disease, Brachial plexus injuries, peripheral nerve injuries, progressive supranuclear palsy (PSP), brain trauma, spinal cord injury, corticobasal degeneration (CBD) and/or neuropathies such a chemotherapy induced neuropathy, Spinocerebellar ataxia (SCA), Niemann-Pick disease type C (NPC), Charcot-Marie-Tooth Disease (CMT), Mucopolysaccharidosis type II (MPSIIA), Mucolipidosis IV, GM1 gangliosidosis, Sporadic inclusion body myositis (sIBM), Henoch-Schonlein purpura (HSP), and Gaucher's disease. In some embodiments, the method includes exposing a cell to a PPM1A inhibitor, for example, a PPM1A antisense oligonucleotide. In some embodiments, the method includes exposing the cell to a PPM1A inhibitor in vivo or ex vivo.

[0421] In an embodiment described herein, the disclosure provides a method of increasing or restoring autophagy in a cell, where the method includes exposing the cell to a PPM1A inhibitor or contacting the cell with a PPM1A inhibitor. In some embodiments, the cell is a cell of a patient in need of treatment of a neurological disease. In some embodiments, the neurological disease is any one of amyotrophic lateral sclerosis (ALS), frontotemporal dementia (FTD), ALS with FTD, Alzheimer's disease (AD), Parkinson's disease (PD), Huntington's disease, Brachial plexus injuries, peripheral nerve injuries, progressive supranuclear palsy (PSP), brain trauma, spinal cord injury, corticobasal degeneration (CBD) and/or neuropathies such a chemotherapy induced neuropathy, Spinocerebellar ataxia (SCA), Niemann-Pick disease type C (NPC), Charcot-Marie-Tooth Disease (CMT), Mucopolysaccharidosis type II (MPSIIA), Mucolipidosis IV, GM1 gangliosidosis, Sporadic inclusion body myositis (sIBM), Henoch-Schonlein purpura (HSP), and Gaucher's disease. In some embodiments, the exposing or contacting is performed in vivo or ex vivo. For example, in an embodiment described herein, a cell of a patient suffering from ALS, FTD, or ALS with FTD is exposed to or contacted with a PPM1A inhibitor, for example, a PPM1A antisense therapeutic, for example, a PPM1A antisense oligonucleotide of any one of SEQ ID NOs: 2-955, SEQ ID NOs: 1910-2863, SEQ ID NOs: 2868-2913, and SEQ ID NOs: 2914-2959.

[0422] The PPM1A inhibitors, for example PPM1A AONs, of the invention can be used alone or in combination with each other where by at least two PPM1A inhibitors of the invention are used together in a single composition or as part of a treatment regimen. The PPM1A inhibitors of the invention may also be used in combination with other drugs for treating neurological diseases or conditions.

[0423] In various embodiments, methods of treating a neurological disease comprises selecting a patient for treatment using a PPM1A inhibitor disclosed herein. Selecting a patient for treatment can include measuring the presence or level of expression of certain markers of neurological disease. Examples of markers include neurofilament light (NEFL), neurofilament heavy (NEFH), phosphorylated neurofilament heavy chain (pNFH), TDP-43, or p75^{ECD}. Such markers can be measured from the plasma, the spinal cord fluid, the cerebrospinal fluid, the extracellular vesicles (for example, CSF exosomes), the blood, the urine, the lymphatic fluid, fecal matter, or a tissue of the patient.

[0424] In particular embodiments, the patient for treatment is selected by measuring phosphorylated neurofilament heavy chain (pNFH) in cerebrospinal fluid (CSF). In particular embodiments, the the pNFH in the CSF of the patient is used to predict disease status and survival in C9ORF72-associated amyotrophic lateral sclerosis (c9ALS) patients after initial administration and/or during on-going treatment.

[0425] In some embodiments, selecting a patient for treatment can include determining whether the patient expresses a mutation of a disease-associated gene. For example, a disease-associated gene can be an ALS-associated gene selected from any of TBK1, TARDBP, SQSTM1, VCP, C9orf72, FUS, and CHCHD10. For example, the patient can be identified as a candidate patient for treatment according to the determination that the patient includes one or more mutations in the disease-associated genes.

[0426] In various embodiments, a patient selected for treatment can be administered a PPM1A inhibitor disclosed herein and/or or a pharmaceutical composition thereof.

[0427] Treatment and Evaluation

[0428] In another aspect, the methods described herein include exposing a cell to a PPM1A inhibitor to inhibit or decrease activity or function of a gene or gene product, for example, an mRNA or protein. For example, described herein is a method of inhibiting PPM1A expression, activity, and/or function in a cell. For example, described herein is a method of inhibiting PPM1A in a cell, where the method includes exposing the cell to a PPM1A inhibitor. In some embodiments, PPM1A expression, activity, and/or function is inhibited in a cell of a patient suffering from ALS, FTD, or ALS with FTD. In some embodiments, the method of inhibiting PPM1A includes exposing a cell to a PPM1A antisense oligonucleotide of any one of SEQ ID NOs: 2-955, SEQ ID NOs: 1910-2863, SEQ ID NOs: 2868-2913, and SEQ ID NOs: 2914-2959.

[0429] In methods described herein, exposing a cell to a PPM1A inhibitor can include administering the PPM1A inhibitor, or a pharmaceutical composition that includes the PPM1A inhibitor, to a patient, for example, a patient suffering from or at risk of developing a neurological disease such as amyotrophic lateral sclerosis (ALS), frontotemporal dementia (FTD), ALS with FTD, Alzheimer's disease (AD), Parkinson's disease (PD), Huntington's disease, Brachial plexus injuries, peripheral nerve injuries, progressive supranuclear palsy (PSP), brain trauma, spinal cord injury, corticobasal degeneration (CBD) and/or neuropathies such a chemotherapy induced neuropathy, Spinocerebellar ataxia (SCA), Niemann-Pick disease type C (NPC), Charcot-Marie-Tooth Disease (CMT), Mucopolysaccharidosis type II (MPSIIA), Mucolipidosis IV, GM1 gangliosidosis, Sporadic inclusion body myositis (sIBM), Henoch-Schonlein purpura (HSP), and Gaucher's disease. Thus, embodiments described herein can include administering a PPM1A inhibitor, or a pharmaceutical composition that includes a PPM1A inhibitor, to a patient in need of treatment, for example, a patient suffering from or at risk of developing a neurological disease such as amyotrophic lateral sclerosis (ALS), frontotemporal dementia (FTD), ALS with FTD, Alzheimer's disease (AD), Parkinson's disease (PD), Huntington's disease, Brachial plexus injuries, peripheral nerve injuries, progressive supranuclear palsy (PSP), brain trauma, spinal cord injury, corticobasal degeneration (CBD) and/or neuropathies such a chemotherapy induced neuropathy, Spinocerebellar ataxia (SCA), Niemann-Pick disease type C (NPC), Charcot-Marie-Tooth Disease (CMT), Mucopolysaccharidosis type II (MPSIIA), Mucolipidosis IV, GM1 gangliosidosis, Sporadic inclusion body myositis (sIBM), Henoch-Schonlein purpura (HSP), and Gaucher's disease. Methods described herein embrace methods of administering a PPM1A inhibitor that allow administration of a therapeutically effective amount of the PPM1A inhibitor to a patient, for example, to a cell of a patient and/or to a site for treatment of a patient. For example, methods described herein include, but are not limited to, methods where a PPM1A inhibitor, or a pharmaceutical composition that includes a PPM1A inhibitor, is administered topically, parenterally, orally, buccally, sublingually, pulmonarily, intrathecally, intracisternally, intratracheally, intranasally, transdermally, rectally, vaginally, or intraduodenally. In particular embodiments, the PPM1A inhibitor is administered orally. In some embodiments, the PPM1A inhibitor is administered intrathecally or intracisternally. In embodiments described herein, the methods include administering a therapeutically effective amount of a PPM1A inhibitor, for example, a therapeutically effective amount of a PPM1A antisense oligonucleotide.

[0430] The methods described herein include methods of administering to a patient and/or exposing a cell to a PPM1A inhibitor, where the PPM1A inhibitor includes a PPM1A antisense oligonucleotide, for example, a PPM1A antisense oligonucleotide of any one of SEQ ID NOs: 2-955, SEQ ID NOs: 1910-2863, SEQ ID NOs: 2868-2913, and SEQ ID NOs: 2914-2959, or a pharmaceutically acceptable salt thereof. In some embodiments, the PPM1A inhibitor is formulated as a pharmaceutical formulation that includes a PPM1A antisense oligonucleotide, for example, a PPM1A antisense oligonucleotide of any one of SEQ ID NOs: 2-955, SEQ ID NOs: 1910-2863, SEQ ID NOs: 2868-2913, and SEQ ID NOs: 2914-2959, or a pharmaceutically acceptable salt thereof.

[0431] The methods described herein also include methods of administering to a patient and/or exposing a cell to a PPM1A inhibitor, where the PPM1A inhibitor is selected from the group consisting of a PPM1A small hairpin RNA (shRNA), a PPM1A small interfering RNA (siRNA), a PPM1A peptide nucleic acid (PNA), a PPM1A locked nucleic acid (LNA), and a PPM1A morpholino oligomer. In some embodiments, the PPM1A inhibitor is formulated as a pharmaceutical formulation that includes a PPM1A shRNA, a PPM1A siRNA, a PPM1A PNA, a PPM1A LNA, or a PPM1A morpholino oligomer, or a pharmaceutically acceptable salt of any of a PPM1A shRNA, a PPM1A siRNA, a PPM1A PNA, a PPM1A LNA, or a PPM1A morpholino oligomer.

[0432] In a further aspect, described herein is a use of a PPM1A inhibitor in the manufacture of a medicament for the treatment of neurological disease. For example, described herein is a use of a PPM1A inhibitor in the manufacture of a medicament for the treatment of ALS, FTD, or ALS with FTD. In some embodiments, the PPM1A inhibitor for use in the manufacture of a medicament for treatment is a PPM1A antisense oligonucleotide, or a pharmaceutically acceptable salt thereof, for example, a PPM1A antisense oligonucleotide of any one of SEQ ID NOs: 2-955, SEQ ID NOs: 1910-2863, SEQ ID NOs: 2868-2913, and SEQ ID NOs: 2914-2959, or a pharmaceutically acceptable salt thereof.

[0433] In a further aspect, described herein is a method of treating a neurological disease in a patient in need thereof, where the method includes administering to the patient in need thereof a pharmaceutical composition comprising a therapeutically effective amount of a PPM1A inhibitor, and a pharmaceutically acceptable excipient. In some embodiments, the neurological disease is amyotrophic lateral sclerosis (ALS), frontotemporal dementia (FTD), ALS with FTD, Alzheimer's disease (AD), Parkinson's disease (PD), Huntington's disease, Brachial plexus injuries, peripheral nerve injuries, progressive supranuclear palsy (PSP), brain trauma, spinal cord injury, corticobasal degeneration (CBD) and/or neuropathies such a chemotherapy induced neuropathy, Spinocerebellar ataxia (SCA), Niemann-Pick disease type C (NPC), Charcot-Marie-Tooth Disease (CMT), Mucopolysaccharidosis type II (MPSIIA), Mucolipidosis IV, GM1 gangliosidosis, Sporadic inclusion body myositis (sIBM), Henoch-Schonlein purpura (HSP), and Gaucher's disease. In some embodiments, the PPM1A inhibitor is a PPM1A antisense oligonucleotide, or a pharmaceutically acceptable salt thereof, for example, a PPM1A antisense oligonucleotide of any one of SEQ ID NOs: 2-955, SEQ ID NOs: 1910-2863, SEQ ID NOs: 2868-2913, and SEQ ID NOs: 2914-2959, or a pharmaceutically acceptable salt thereof. In some embodiments, the PPM1A inhibitor is a PPM1A shRNA, a PPM1A siRNA, a PPM1A PNA, a PPM1A LNA, or a PPM1A morpholino oligomer. In some embodiments, the PPM1A inhibitor is a pharmaceutically acceptable salt of any of a PPM1A shRNA, a PPM1A siRNA, a PPM1A PNA, a PPM1A LNA, or a PPM1A morpholino oligomer.

[0434] In embodiments described herein, the pharmaceutical composition comprising a therapeutically effective amount of a PPM1A inhibitor, and a pharmaceutically acceptable excipient can be administered in any number of ways to achieve therapeutic delivery to a cell of a patient and/or to a site for treatment of a patient in need thereof. For example, in embodiments described herein, a pharmaceutical composition comprising a therapeutically effective amount PPM1A inhibitor, and a pharmaceutically acceptable excipient can be administered topically, parenterally, intrathecally, orally, pulmonarily, intratracheally, intranasally, transdermally, buccally, sublingually, rectally, vaginally, or intraduodenally. In particular embodiments, the pharmaceutical composition is administered orally. In some embodiments, the pharmaceutical composition is administered intrathecally or intracisternally. In embodiments described herein, the patient is a mammal, for example, a human patient.

[0435] In some embodiments, a PPM1A inhibitor described herein is for use as a medicament. For example, described herein is a PPM1A antisense oligonucleotide of any one of SEQ ID NOs: 2-955, SEQ ID NOs: 1910-2863, SEQ ID NOs: 2868-2913, and SEQ ID NOs: 2914-2959, or a pharmaceutically acceptable salt thereof, for use as a medicament.

[0436] In some embodiments, a PPM1A inhibitor, for example, a PPM1A antisense oligonucleotide described herein, is for use in the treatment of a neurological disease. For example, described herein is a PPM1A antisense oligonucleotide of any one of SEQ ID NOs: 2-955, SEQ ID NOs: 1910-2863, SEQ ID NOs: 2868-2913, and SEQ ID NOs: 2914-2959, or a pharmaceutically acceptable salt thereof, for use in the treatment of a neurological disease. In some embodiments, the neurological disease is selected from the group consisting of amyotrophic lateral sclerosis (ALS), frontotemporal dementia (FTD), ALS with FTD, Alzheimer's disease (AD), Parkinson's disease (PD), Huntington's disease, Brachial plexus injuries, peripheral nerve injuries, progressive supranuclear palsy (PSP), brain trauma, spinal cord injury, corticobasal degeneration (CBD) and/or neuropathies such a chemotherapy induced neuropathy, Spinocerebellar ataxia (SCA), Niemann-Pick disease type C (NPC), Charcot-Marie-Tooth Disease (CMT), Mucopolysaccharidosis type II (MPSIIA), Mucolipidosis IV, GM1 gangliosidosis, Sporadic inclusion body myositis (sIBM), Henoch-Schonlein purpura (HSP), and Gaucher's disease.

[0437] A patient, as described herein, refers to any animal at risk for, suffering from or diagnosed with a neurological disease, including, but not limited to, mammals, primates, and humans. In certain embodiments, the patient may be a non-human mammal such as, for example, a cat, a dog, or a horse. A patient may be an individual diagnosed with a high risk of developing a neurological disease, someone who has been diagnosed with a neurological disease, someone who previously suffered from a neurological disease, or an individual evaluated for symptoms or indications of a neurological disease, for example, decreased TBK1 expression signal or activity, impaired autophagy, TDP43 aggregation, or any of the signs or symptoms associated with neurological diseases such as amyotrophic lateral sclerosis (ALS), frontotemporal dementia (FTD), ALS with FTD, Alzheimer's disease (AD), Parkinson's disease (PD), Huntington's disease, Brachial plexus injuries, peripheral nerve injuries, progressive supranuclear palsy (PSP), brain trauma, spinal cord injury, corticobasal degeneration (CBD) and/or neuropathies such a chemotherapy induced neuropathy, Spinocerebellar ataxia (SCA), Niemann-Pick disease type C (NPC), Charcot-Marie-Tooth Disease (CMT), Mucopolysaccharidosis type II (MPSIIA), Mucolipidosis IV, GM1 gangliosidosis, Sporadic inclusion body myositis (sIBM), Henoch-Schonlein purpura (HSP), or Gaucher's disease.

[0438] “A patient in need,” as used herein, refers to a patient suffering from any of the symptoms or manifestations of a neurological disease, a patient who may suffer from any of the symptoms or manifestations of a neurological disease, or any patient who might benefit from a method of the disclosure for treating a neurological disease. A patient in need may include a patient who is diagnosed with a risk of developing a neurological disease, a patient who has suffered from a neurological disease in the past, or a patient who has previously been treated for a neurological disease. Of particular relevance are individuals that suffer from a neurological disease associated with impaired TBK1 expression or activity or deleterious PPM1A expression or activity.

[0439] “Effective amount,” as used herein, refers to the amount of an agent that is sufficient to at least partially treat a condition when administered to a patient. The therapeutically effective amount will vary depending on the severity of the condition, the route of administration of the component, and the age, weight, etc. of the patient being treated. Accordingly, an effective amount of a disclosed PPM1A inhibitor is the amount of the PPM1A inhibitor necessary to treat a neurological disease in a patient such that administration of the agent prevents a neurological disease from occurring in a subject, prevents neurological disease progression (e.g., prevents the onset or increased severity of symptoms of the neurological disease such as muscle weakening, spasms, or fasciculation), or relieves or completely ameliorates all associated symptoms of a neurological disease, e.g., causes regression of the disease.

[0440] Efficacy of treatment may be evaluated by means of evaluation of gross symptoms associated with a neurological disease, analysis of tissue histology, biochemical assay, imaging methods such as, for example, magnetic resonance imaging, or other known methods. For instance, efficacy of treatment may be evaluated by analyzing gross symptoms of the disease such as changes in muscle strength and control or other aspects of gross pathology associated with a neurological disease following administration of a disclosed PPM1A inhibitor to a patient suffering from a neurological disease.

[0441] Efficacy of treatment may also be evaluated at the tissue or cellular level, for example, by means of obtaining a tissue biopsy (e.g., a brain, spinal, muscle, or motor neuron tissue biopsy) and evaluating gross tissue or cell morphology or staining properties, or by obtaining a biofluid (e.g., cerebrospinal fluid, exosomes, plasma, or urine) and examining PPM1A expression in the fluid using a biochemical assay that examines protein or RNA expression. Such biochemical assays can include ddPCR, qRT-PCR, western blot, ELISA, and/or SIMOA. For instance, one may evaluate levels of a protein (e.g., TBK1 or levels of another protein or gene product) indicative of a disease or a neurological disease, in dissociated cells or non-dissociated tissue via immunocytochemical, immunohistochemical, Western blotting, or Northern blotting methods, or methods useful for evaluating RNA levels such as quantitative or semi-quantitative polymerase chain (e.g., digital PCR (DigitalPCR, dPCR, or dePCR), qPCR etc.) reaction. One may also evaluate the presence or level of expression of useful biomarkers (e.g., neurofilament light (NEFL), neurofilament heavy (NEFH), TDP-43 or p75 extracellular domain (p75^{ECD})) found in spinal cord fluid, cerebrospinal fluid, plasma, extracellular vesicles (for example, exosome-like cerebrospinal fluid extracellular vesicles (“CSF exosomes”), such as those described in Welton et al., (2017) “Cerebrospinal fluid extracellular vesicle enrichment for protein biomarker discovery in neurological disease; multiple sclerosis” J Extracell Vesicles., 6(1):1-10; and Street et al., (2012) “Identification and proteomic profiling of exosomes in human cerebrospinal fluid” J Transl. Med., 10:5), urine, fecal matter, lymphatic fluid, blood, plasma, or serum to evaluate disease state and efficacy of treatment. Additional measurements of efficacy may include strength duration time constant (SDTC), short interval cortical inhibition (SICI), dynamometry, accurate test of limb isometric strength (ATLIS), compound muscle action potential (CMAP), and ALSFRS-R. In certain embodiments, urinary neurotrophin receptor p75 extracellular domain (p75^{ECD}) is a disease progression and prognostic biomarker in amyotrophic lateral sclerosis (ALS). Phosphorylated neurofilanent heavy chain (pNFH) in cerebrospinal fluid (CSF) predict disease status and survival in C9ORF72-associated amyotrophic lateral sclerosis (c9ALS) patients. CSF pNFH can serve as a prognostic biomarker for clinical trials, which will increase the likelihood of successfully developing a treatment for c9ALS.

[0442] In some embodiments, in evaluating the efficacy of a treatment against Alzheimer's disease, mental performance can be used for measuring efficacy such as with the Mini-Mental State Examination (MMSE). For measuring efficacy, the Functional Assessment Staging Test (FAST), the Motor Screening Task, Paired Associates Learning, Spatial Working Memory, Reaction time, Rapid Visual Information Processing, Delayed Matching to Sample, Pattern Recognition Memory can be used.

[0443] In some embodiments, in evaluating the efficacy of a treatment against Parkinson's disease, the Unified Parkinson's Disease Rating Scale (UPDRS) can be implemented as the performance measure. Other measures for quantifying aspects of functional performance not measured by the UPDRS can include the Berg Balance Scale (BBS), Forward Functional Reach Test (FFR), Backward Functional Reach Test (BFR), Timed “Up & Go” Test (TUG), and gait speed.

[0444] In evaluating efficacy of treatment, suitable controls may be chosen to ensure a valid assessment. For instance, one can compare symptoms evaluated in a patient with a neurological disease following administration of a disclosed PPM1A inhibitor to those symptoms in the same patient prior to treatment or at an earlier point in the course of treatment or in another patient not diagnosed with the neurological disease. Alternatively, one may compare the results of biochemical or histological analysis of tissue following administration of a disclosed PPM1A inhibitor with those of tissue from the same patient or from an individual not diagnosed with the neurological disease or from the same patient prior to administration of the PPM1A inhibitor. Additionally, one may compare blood, plasma, serum, cell, urine, lymphatic fluid, spinal cord fluid, cerebrospinal fluid, or fecal samples following administration of the PPM1A inhibitor with comparable samples from an individual not diagnosed with the neurological disease or from the same patient prior to administration of the PPM1A inhibitor. In some embodiments one may compare extracellular vesicles (for example CSF exosomes), following administration of the PPM1A inhibitor with extracellular vesicles from an individual not diagnosed with the neurological disease or from the same patient prior to administration of the PPM1A inhibitor.

[0445] Validation of PPM1A inhibition may be determined by direct or indirect assessment of PPM1A expression levels or activity. For instance, biochemical assays that measure PPM1A protein or RNA expression may be used to evaluate overall PPM1A inhibition. For instance, one may measure PPM1A protein levels in cells or tissue by Western blot to evaluate overall PPM1A levels. One may also measure PPM1A mRNA levels by means of Northern blot or quantitative polymerase chain reaction to determine overall PPM1A inhibition. One may also evaluate PPM1A protein levels or levels of another protein indicative of PPM1A signaling activity in dissociated cells, non-dissociated tissue, extracellular vesicles (for example, CSF exosomes), blood, serum, or fecal matter via immunocytochemical or immunohistochemical methods. PPM1A inhibition may also be evaluated indirectly by measuring parameters such as autophagy, endocytosis, protein aggregation, TBK1 expression, TBK1 kinase activity, changes in patient strength, muscle tone, presence of muscle spasms, enhanced speech, walking, breathing, or memory, or other parameters correlated with changes in PPM1A activity, including TBK1 target phosphorylation and other indicators of signaling activation of TBK1. For instance, one may measure levels of active TBK1 phosphorylation or the ratio of active (phosphorylated) to inactive TBK1 in cells of a patient treated with a disclosed PPM1A inhibitor as an indication of PPM1A activity in said cells. One may also evaluate the presence or level of expression of useful biomarkers (e.g., neurofilament light (NEFL), neurofilament heavy (NEFH), TDP-43, or p75^{ECD} found in plasma, spinal cord fluid, cerebrospinal fluid, extracellular vesicles (for example, CSF exosomes), blood, urine, lymphatic fluid, fecal matter, or tissue to evaluate efficacy of PPM1A inhibition. Additional measurements may include strength duration time constant (SDTC), short interval cortical inhibition (SICI), dynamometry, accurate test of limb isometric strength (ATLIS), compound muscle action potential, and ALSFRS-R. In certain embodiments, urinary neurotrophin receptor p75 extracellular domain (p75^{ECD}) is a disease progression and prognostic biomarker in amyotrophic lateral sclerosis (ALS). Phosphorylated neurofilament heavy chain (pNFH) in cerebrospinal fluid (CSF) predict disease status and survival in c9ALS patients. CSF pNFH can serve as a prognostic biomarker for clinical trials, which will increase the likelihood of successfully developing a treatment for c9ALS.

[0446] Methods of treatment disclosed herein include methods of increasing or restoring autophagy in a cell. “Autophagy” refers to the natural, regulated mechanism of the cell that disassembles unnecessary or dysfunctional components, allowing orderly degradation and recycling of cellular components. Autophagy is generally responsible for degrading relatively long-lived, cytoplasmic proteins, soluble and insoluble misfolded proteins, and also entire organelles. Failure in autophagy machinery is thought to contribute to the formation of toxic protein aggregates in motor neurons (See Ramesh and Pandley, (2017) “Autophagy Dysregulation in ALS: When Protein Aggregates Get Out of Hand” Front Mol Neurosci. 10 (Article 263)). Dysregulation of autophagy and protein aggregation and mislocalization is implicated in neurological diseases, including ALS. Methods of increasing or restoring autophagy include methods that reduce expression levels of PPM1A in a patient suffering from a neurological disease. Methods of increasing or restoring autophagy also include methods that increase TBK1 activity or expression or TBK1 phosphorylation (for example, TBK1 ser172 phosphorylation) in cells of a patient suffering from a neurological disease.

[0447] The disclosure also provides methods of inhibiting PPM1A in cells of a patient suffering from a neurological disease. PPM1A may be inhibited in any cell in which PPM1A expression or activity occurs, including cells of the nervous system (including the central nervous system, the peripheral nervous system, motor neurons, the brain, the brain stem, the frontal lobes, the temporal lobes, the spinal cord), the musculoskeletal system, spinal fluid, and cerebrospinal fluid. Cells of the musculoskeletal system include skeletal muscle cells (e.g., myocytes). Motor neurons include upper motor neurons and lower motor neurons.

[0448] Pharmaceutical Compositions and Routes of Administration

[0449] The present disclosure also provides methods for treating a neurological disease via administration of a pharmaceutical composition comprising a disclosed PPM1A inhibitor. In another aspect, the disclosure provides a pharmaceutical composition for use in treating a neurological disease. The pharmaceutical composition may be comprised of a disclosed antisense oligonucleotide that targets PPM1A and a pharmaceutically acceptable carrier. As used herein the term “pharmaceutical composition” means, for example, a mixture containing a specified amount of a therapeutic compound, e.g., a therapeutically effective amount, of a therapeutic compound in a pharmaceutically acceptable carrier to be administered to a mammal, e.g., a human, in order to treat a neurological disease. In some embodiments, contemplated herein are pharmaceutical compositions comprising a disclosed PPM1A inhibitor and a pharmaceutically acceptable carrier. In another aspect, the disclosure provides use of a disclosed PPM1A inhibitor in the manufacture of a medicament for treating a neurological disease. “Medicament,” as used herein, has essentially the same meaning as the term “pharmaceutical composition.”

[0450] As used herein, “pharmaceutically acceptable carrier” means buffers, carriers, and excipients suitable for use in contact with the tissues of human beings and animals without excessive toxicity, irritation, allergic response, or other problem or complication, commensurate with a reasonable benefit/risk ratio. The carrier(s) should be “acceptable” in the sense of being compatible with the other ingredients of the formulations and not deleterious to the recipient. Pharmaceutically acceptable carriers include buffers, solvents, dispersion media, coatings, isotonic and absorption delaying agents, and the like, that are compatible with pharmaceutical administration. The use of such media and agents for pharmaceutically active substances is known in the art. In one embodiment the pharmaceutical composition is administered orally and includes an enteric coating suitable for regulating the site of absorption of the encapsulated substances within the digestive system or gut. For example, an enteric coating can include an ethylacrylate-methacrylic acid copolymer.

[0451] In some embodiments, a PPM1A inhibitor of the disclosure, for example, a PPM1A antisense oligonucleotide, is in the form of a pharmaceutically acceptable salt. PPM1A inhibitors described herein that are acidic in nature are capable of forming base salts with various pharmacologically acceptable cations. Examples of such salts include alkali metal or alkaline earth metal salts and, particularly, calcium, magnesium, sodium, lithium, zinc, potassium, and iron salts. Pharmaceutically acceptable salts of the disclosure include, for example, pharmaceutically acceptable salts of a PPM1A antisense oligonucleotide of any of SEQ ID NOs: 2-955, SEQ ID NOs: 1910-2863, SEQ ID NOs: 2868-2913, and SEQ ID NOs: 2914-2959.

[0452] Also described herein are pharmaceutical compositions comprising a PPM1A inhibitor and a pharmaceutically acceptable excipient. For example, a pharmaceutical composition described herein can include a PPM1A antisense oligonucleotide, for example, a PPM1A antisense oligonucleotide of any one of SEQ ID NOs: 2-955, SEQ ID NOs: 1910-2863, SEQ ID NOs: 2868-2913, and SEQ ID NOs: 2914-2959, and a pharmaceutically acceptable excipient.

[0453] In some embodiments, a PPM1A inhibitor, for example a PPM1A AON, can be encapsulated in a nanoparticle coating. It is believed that nanoparticle encapsulation prevents AON degradation and enhances cellular uptake. For example, in some embodiments a PPM1A inhibitor is encapsulated in a coating of a cationic polymer, for example, a synthetic polymer (e.g., poly-L-lysine, polyamidoamine, a poly(O-amino ester), and polyethyleneimine) or a naturally occurring polymer (e.g., chitosan and a protamine). In some embodiments, a PPM1A inhibitor is encapsulated in a lipid or lipid-like material, for example, a cationic lipid, a cationic lipid-like material, or an ionizable lipid that is positively charged only at an acidic pH. For example, in some embodiments, a PPM1A inhibitor is encapsulated in a lipid nanoparticle that includes hydrophobic moieties, e.g., cholesterol and/or a polyethylene glycol (PEG) lipid.

[0454] In some embodiments, a PPM1A inhibitor, for example, a PPM1A AON, is conjugated to a bioactive ligand. For example, in some embodiments described herein, a PPM1A inhibitor such as a PPM1A AON is conjugated to a peptide, a lipid, N-acetylgalactosamine (GalNAc), cholesterol, vitamin E, an antibody, or a cell-penetrating peptide (for example, transactivator of transcription (TAT) and penetratine).

[0455] Pharmaceutical compositions containing a disclosed PPM1A inhibitor, such as those disclosed herein, can be presented in a dosage unit form and can be prepared by any suitable method. A pharmaceutical composition should be formulated to be compatible with its intended route of administration. Useful formulations can be prepared by methods well known in the pharmaceutical art. For example, see Remington's Pharmaceutical Sciences, 18th ed. (Mack Publishing Company, 1990).

[0456] Pharmaceutical formulations, for example, are sterile. Sterilization can be accomplished, for example, by filtration through sterile filtration membranes. Where the composition is lyophilized, filter sterilization can be conducted prior to or following lyophilization and reconstitution.

[0457] In one embodiment, a disclosed PPM1A inhibitor and any pharmaceutical composition thereof may be administered by one or several routes, including topically, intrathecally, parenterally, orally, rectally, buccally, sublingally, vaginally, pulmonarily, intratracheally, intracisternally, intranasally, transdermally, or intraduodenally. The term parenteral as used herein includes subcutaneous injections, intrapancreatic administration, intravenous, intracisternal, intrathecal, intramuscular, intraperitoneal, intrasternal injection or infusion techniques. For example, a disclosed PPM1A inhibitor may be administered subcutaneously to a subject. In another example, a disclosed PPM1A inhibitor may be administered orally to a subject. In another example, a disclosed PPM1A inhibitor may be administered directly to the nervous system, or specific regions or cells of the nervous system (e.g., the brain, brain stem, lower motor neurons, spinal cord, upper motor neurons) via parenteral administration, for example, a disclosed PPM1A inhibitor may be administered intrathecally or intracisternally.

[0458] It will be appreciated that the PPM1A inhibitor, for example, the PPM1A antisense oligonucleotide administered to the patient having or at risk of a neurological disease in methods described herein, can be administered by various administration routes. In various embodiments, the PPM1A inhibitor can be administered by one or several routes, including orally (e.g., by inhalation spray), topically, vaginally, rectally, intrathecally, intracisternally, buccally, sublingually, parenterally, e.g., by subcutaneous injection. The term parenteral as used herein includes subcutaneous injections, intrapancreatic administration, and intravenous, intrathecal, intracisternal, intramuscular, intraperitoneal, and intrasternal injection or infusion techniques.

[0459] Parenteral Administration

[0460] The pharmaceutical compositions of the disclosure can be formulated for parenteral administration, e.g., formulated for injection via the intravenous, intracisternal, intramuscular, subcutaneous, intrathecal, intralesional, or intraperitoneal routes. The preparation of an aqueous composition, such as an aqueous pharmaceutical composition containing a disclosed PPM1A inhibitor, will be known to those of skill in the art in light of the present disclosure. Typically, such compositions can be prepared as injectables, either as liquid solutions or suspensions; solid forms suitable for using to prepare solutions or suspensions upon the addition of a liquid prior to injection can also be prepared; and the preparations can also be emulsified.

[0461] The pharmaceutical forms suitable for injectable use include sterile aqueous solutions or dispersions; formulations including sesame oil, peanut oil or aqueous propylene glycol; and sterile powders for the extemporaneous preparation of sterile injectable solutions or dispersions. In all cases the form must be sterile and must be fluid to the extent that easy syringability exists. It must be stable under the conditions of manufacture and storage and must be preserved against the contaminating action of microorganisms, such as bacteria and fungi.

[0462] Solutions of active compounds as free base or pharmacologically acceptable salts can be prepared in water suitably mixed with a surfactant, such as hydroxypropylcellulose. Dispersions can also be prepared in glycerol, liquid polyethylene glycols, and mixtures thereof and in oils. In addition, sterile, fixed oils may be employed as a solvent or suspending medium. For this purpose any bland fixed oil can be employed including synthetic mono- or diglycerides. In addition, fatty acids such as oleic acid can be used in the preparation of injectables. The sterile injectable preparation may also be a sterile injectable solution, suspension, or emulsion in a nontoxic parenterally acceptable diluent or solvent, for example, as a solution in 1,3-butanediol. Among the acceptable vehicles and solvents that may be employed are water, Ringer's solution, U.S.P., and isotonic sodium chloride solution. In one embodiment, a disclosed PPM1A antisense oligonucleotide may be suspended in a carrier fluid comprising 1% (w/v) sodium carboxymethylcellulose and 0.1% (v/v) TWEEN™ 80. Under ordinary conditions of storage and use, these preparations contain a preservative to prevent the growth of microorganisms.

[0463] Injectable preparations, for example, sterile injectable aqueous or oleaginous suspensions may be formulated according to the known art using suitable dispersing or wetting agents and suspending agents. Generally, dispersions are prepared by incorporating the various sterilized active ingredients into a sterile vehicle which contains the basic dispersion medium and the required other ingredients from those enumerated above. Sterile injectable solutions of the disclosure may be prepared by incorporating a disclosed PPM1A antisense oligonucleotide in the required amount of the appropriate solvent with various of the other ingredients enumerated above, as required, followed by filtered sterilization. In the case of sterile powders for the preparation of sterile injectable solutions, the preferred methods of preparation are vacuum-drying and freeze-drying techniques which yield a powder of the active ingredient plus any additional desired ingredient from a previously sterile-filtered solution thereof. The injectable formulations can be sterilized, for example, by filtration through a bacteria-retaining filter.

[0464] The preparation of more, or highly concentrated solutions for intramuscular injection is also contemplated. In this regard, the use of DMSO as solvent is preferred as this will result in extremely rapid penetration, delivering high concentrations of the disclosed PPM1A inhibitor to a small area.

[0465] Suitable preservatives for use in such a solution include benzalkonium chloride, benzethonium chloride, chlorobutanol, thimerosal and the like. Suitable buffers include boric acid, sodium and potassium bicarbonate, sodium and potassium borates, sodium and potassium carbonate, sodium acetate, sodium biphosphate and the like, in amounts sufficient to maintain the pH at between about pH 6 and pH 8, and for example, between about pH 7 and pH 7.5. Suitable tonicity agents are dextran 40, dextran 70, dextrose, glycerin, potassium chloride, propylene glycol, sodium chloride, and the like, such that the sodium chloride equivalent of the solution is in the range 0.9 plus or minus 0.2%. Suitable antioxidants and stabilizers include sodium bisulfite, sodium metabisulfite, sodium thiosulfite, thiourea and the like. Suitable wetting and clarifying agents include polysorbate 80, polysorbate 20, poloxamer 282 and tyloxapol. Suitable viscosity-increasing agents include dextran 40, dextran 70, gelatin, glycerin, hydroxyethylcellulose, hydroxymethylpropylcellulose, lanolin, methylcellulose, petrolatum, polyethylene glycol, polyvinyl alcohol, polyvinylpyrrolidone, carboxymethylcellulose and the like.

[0466] Intrathecal Administration

[0467] In some embodiments, a PPM1A inhibitor, or a pharmaceutical composition of the disclosure that includes a PPM1A inhibitor, is delivered to the CNS through intrathecal administration, thereby ensuring delivery into the cerebrospinal fluid (CSF) of a patient in need of treatment. In various embodiments, intrathecal administration (also referred to as intrathecal injection) refers to an injection into the spinal canal (intrathecal space surrounding the spinal cord). Various techniques may be used including, without limitation, lateral cerebroventricular injection through a burrhole or cisternal or lumbar puncture or the like. In some embodiments, “intrathecal administration” or “intrathecal delivery” according to the present invention refers to IT administration or delivery via the lumbar area or region, e.g., lumbar IT administration or delivery. As used herein, the term “lumbar region” or “lumbar area” refers to the area between the third and fourth lumbar (lower back) vertebrae and, more inclusively, the L2-S1 region of the spine.

[0468] In various embodiments, compositions comprising a disclosed PPM1A inhibitor can be suitable for intrathecal delivery. For example, a composition suitable for intrathecal delivery can comprise the PPM1A inhibitor and any of cerebrospinal fluid, artificial cerebrospinal fluid, phosphate buffered saline (PBS), or salt buffer.

[0469] Oral Administration

[0470] In some embodiments, contemplated herein are compositions suitable for oral delivery of a disclosed PPM1A inhibitor, e.g., tablets that include an enteric coating, e.g., a gastro-resistant coating, such that the compositions may deliver a PPM1A inhibitor to, e.g., the gastrointestinal tract of a patient.

[0471] For example, a tablet for oral administration is provided that comprises granules (e.g., is at least partially formed from granules) that include a disclosed PPM1A inhibitor, e.g., an PPM1A antisense oligonucleotide, e.g., a PPM1A antisense oligonucleotide represented by any of SEQ ID NOs: 2-955, SEQ ID NOs: 1910-2863, SEQ ID NOs: 2868-2913, and SEQ ID NOs: 2914-2959, and pharmaceutically acceptable excipients. Such a tablet may be coated with an enteric coating. Contemplated tablets may include pharmaceutically acceptable excipients such as fillers, binders, disintegrants, and/or lubricants, as well as coloring agents, release agents, coating agents, sweetening, flavoring such as wintergreen, orange, xylitol, sorbitol, fructose, and maltodextrin, and perfuming agents, preservatives and/or antioxidants.

[0472] In some embodiments, contemplated pharmaceutical formulations include an intra-granular phase that includes a disclosed PPM1A inhibitor, e.g. a PPM1A antisense oligonucleotide, e.g., a PPM1A antisense oligonucleotide represented by any of SEQ ID NOs: 2-955, SEQ ID NOs: 1910-2863, SEQ ID NOs: 2868-2913, and SEQ ID NOs: 2914-2959, and a pharmaceutically acceptable salt, e.g. a PPM1A antisense oligonucleotide, e.g., an antisense oligonucleotide represented by any of SEQ ID NOs: 2-955, SEQ ID NOs: 1910-2863, SEQ ID NOs: 2868-2913, and SEQ ID NOs: 2914-2959, and a pharmaceutically acceptable filler. For example, a disclosed PPM1A inhibitor and a filler may be blended together, optionally, with other excipients, and formed into granules. In some embodiments, the intragranular phase may be formed using wet granulation, e.g. a liquid (e.g., water) is added to the blended PPM1A inhibitor compound and filler, and then the combination is dried, milled and/or sieved to produce granules. One of skill in the art would understand that other processes may be used to achieve an intragranular phase.

[0473] In some embodiments, contemplated formulations include an extra-granular phase, which may include one or more pharmaceutically acceptable excipients, and which may be blended with the intragranular phase to form a disclosed formulation.

[0474] A disclosed formulation may include an intragranular phase that includes a filler. Exemplary fillers include, but are not limited to, cellulose, gelatin, calcium phosphate, lactose, sucrose, glucose, mannitol, sorbitol, microcrystalline cellulose, pectin, polyacrylates, dextrose, cellulose acetate, hydroxypropylmethyl cellulose, partially pre-gelatinized starch, calcium carbonate, and others including combinations thereof.

[0475] In some embodiments, a disclosed formulation may include an intragranular phase and/or an extragranular phase that includes a binder, which may generally function to hold the ingredients of the pharmaceutical formulation together. Exemplary binders of the disclosure may include, but are not limited to, the following: starches, sugars, cellulose or modified cellulose such as hydroxypropyl cellulose, lactose, pre-gelatinized maize starch, polyvinyl pyrrolidone, hydroxypropyl cellulose, hydroxypropylmethyl cellulose, low substituted hydroxypropyl cellulose, sodium carboxymethyl cellulose, methyl cellulose, ethyl cellulose, sugar alcohols and others including combinations thereof.

[0476] Contemplated formulations, e.g., that include an intragranular phase and/or an extragranular phase, may include a disintegrant such as but are not limited to, starch, cellulose, crosslinked polyvinyl pyrrolidone, sodium starch glycolate, sodium carboxymethyl cellulose, alginates, corn starch, crosmellose sodium, crosslinked carboxymethyl cellulose, low substituted hydroxypropyl cellulose, acacia, and others including combinations thereof. For example, an intragranular phase and/or an extragranular phase may include a disintegrant.

[0477] In some embodiments, a contemplated formulation includes an intra-granular phase comprising a disclosed PPM1A inhibitor and excipients chosen from: mannitol, microcrystalline cellulose, hydroxypropylmethyl cellulose, and sodium starch glycolate or combinations thereof, and an extra-granular phase comprising one or more of: microcrystalline cellulose, sodium starch glycolate, and magnesium stearate or mixtures thereof.

[0478] In some embodiments, a contemplated formulation may include a lubricant, e.g. an extra-granular phase may contain a lubricant. Lubricants include but are not limited to talc, silica, fats, stearin, magnesium stearate, calcium phosphate, silicone dioxide, calcium silicate, calcium phosphate, colloidal silicon dioxide, metallic stearates, hydrogenated vegetable oil, corn starch, sodium benzoate, polyethylene glycols, sodium acetate, calcium stearate, sodium lauryl sulfate, sodium chloride, magnesium lauryl sulfate, talc, and stearic acid.

[0479] In some embodiments, the pharmaceutical formulation comprises an enteric coating. Generally, enteric coatings create a barrier for the oral medication that controls the location at which the drug is absorbed along the digestive track. Enteric coatings may include a polymer that disintegrates at different rates according to pH. Enteric coatings may include for example, cellulose acetate phthalate, methyl acrylate-methacrylic acid copolymers, cellulose acetate succinate, hydroxylpropylmethyl cellulose phthalate, methyl methacrylate-methacrylic acid copolymers, ethylacrylate-methacrylic acid copolymers, methacrylic acid copolymer type C, polyvinyl acetate-phthalate, and cellulose acetate phthalate.

[0480] Exemplary enteric coatings include Opadry® AMB, Acryl-EZE®, Eudragit® grades. In some embodiments, an enteric coating may comprise about 5% to about 10%, about 5% to about 20%, 8 to about 15%, about 8% to about 20%, about 10% to about 20%, or about 12 to about 20%, or about 18% of a contemplated tablet by weight. For example, enteric coatings may include an ethylacrylate-methacrylic acid copolymer.

[0481] For example, in a contemplated embodiment, a tablet is provided that comprises or consists essentially of about 0.5% to about 70%, e.g. about 0.5% to about 10%, or about 1% to about 20%, by weight of a disclosed PPM1A antisense oligonucleotide or a pharmaceutically acceptable salt thereof. Such a tablet may include for example, about 0.5% to about 60% by weight of mannitol, e.g. about 30% to about 50% by weight mannitol, e.g. about 40% by weight mannitol; and/or about 20% to about 40% by weight of microcrystalline cellulose, or about 10% to about 30% by weight of microcrystalline cellulose. For example, a disclosed tablet may comprise an intragranular phase that includes about 30% to about 60%, e.g. about 45% to about 65% by weight, or alternatively, about 5 to about 10% by weight of a disclosed PPM1A antisense oligonucleotide, about 30% to about 50%, or alternatively, about 5% to about 15% by weight mannitol, about 5% to about 15% microcrystalline cellulose, about 0% to about 4%, or about 1% to about 7% hydroxypropylmethylcellulose, and about 0% to about 4%, e.g. about 2% to about 4% sodium starch glycolate by weight.

[0482] In another contemplated embodiment, a pharmaceutical tablet formulation for oral administration of a disclosed PPM1A inhibitor comprises an intra-granular phase, wherein the intra-granular phase includes a disclosed PPM1A AON or a pharmaceutically acceptable salt thereof (such as a sodium salt), and a pharmaceutically acceptable filler, and which may also include an extra-granular phase, that may include a pharmaceutically acceptable excipient such as a disintegrant. The extra-granular phase may include components chosen from microcrystalline cellulose, magnesium stearate, and mixtures thereof. The pharmaceutical composition may also include an enteric coating of about 12% to 20% by weight of the tablet. For example, a pharmaceutically acceptable tablet for oral use may comprise about 0.5% to 10% by weight of a disclosed PPM1A AON, e.g., a disclosed PPM1A AON or a pharmaceutically acceptable salt thereof, about 30% to 50% by weight mannitol, about 10% to 30% by weight microcrystalline cellulose, and an enteric coating comprising an ethylacrylate-methacrylic acid copolymer.

[0483] In another example, a pharmaceutically acceptable tablet for oral use may comprise an intra-granular phase, comprising about 5 to about 10% by weight of a disclosed PPM1A AON, e.g., a disclosed PPM1A AON or a pharmaceutically acceptable salt thereof, about 40% by weight mannitol, about 8% by weight microcrystalline cellulose, about 5% by weight hydroxypropylmethyl cellulose, and about 2% by weight sodium starch glycolate; an extra-granular phase comprising about 17% by weight microcrystalline cellulose, about 2% by weight sodium starch glycolate, about 0.4% by weight magnesium stearate; and an enteric coating over the tablet comprising an ethylacrylate-methacrylic acid copolymer.

[0484] In some embodiments the pharmaceutical composition may contain an enteric coating comprising about 13% or about 15%, 16%, 17% or 18% by weight, e.g., AcyrlEZE® (see, e.g., PCT Publication No. WO 2010/054826, which is hereby incorporated by reference in its entirety).

[0485] The rate at which the coating dissolves and the active ingredient is released is its dissolution rate. In an embodiment, a contemplated tablet may have a dissolution profile, e.g. when tested in a USP/EP Type 2 apparatus (paddle) at 100 rpm and 37° C. in a phosphate buffer with a pH of 7.2, of about 50% to about 100% of the PPM1A inhibitor releasing after about 120 minutes to about 240 minutes, for example after 180 minutes. In another embodiment, a contemplated tablet may have a dissolution profile, e.g. when tested in a USP/EP Type 2 apparatus (paddle) at 100 rpm and 3TC in diluted HCl with a pH of 1.0, where substantially none of the PPM1A inhibitor is released after 120 minutes. A contemplated tablet, in another embodiment, may have a dissolution profile, e.g. when tested in USP/EP Type 2 apparatus (paddle) at 100 rpm and 37° C. in a phosphate buffer with a pH of 6.6, of about 10% to about 30%, or not more than about 50%, of the PPM1A inhibitor releasing after 30 minutes.

[0486] In some embodiments, methods provided herein may further include administering at least one other agent that is directed to treatment of diseases and disorders disclosed herein. In one embodiment, contemplated other agents may be co-administered (e.g., sequentially or simultaneously).

[0487] Dosage and Frequency of Administration

[0488] Exemplary formulations include dosage forms that include or consist essentially of about 35 mg to about 500 mg of a disclosed PPM1A inhibitor, for example, a PPM1A AON. For example, formulations that include about 35 mg, 40 mg, 50 mg, 60 mg, 70 mg, 80 mg, 90 mg, 100 mg, 110 mg, 120 mg, 130 mg, 140 mg, 150 mg, 160 mg, 170 mg, 180 mg, 190 mg, 200 mg, 250 mg, 300 mg, 350 mg, 400 mg, 450 mg, 500 mg, 600 mg, 700 mg, 800 mg, 900 mg, 1 g, 1.5 g, 2.0 g, 2.5 g, 3.0 g, 3.5 g, 4.0 g, 4.5 g, or 5.0 g of a disclosed PPM1A inhibitor are contemplated herein. In one embodiment, a formulation may include about 40 mg, 80 mg, or 160 mg of a disclosed PPM1A inhibitor. In some embodiments, a formulation may include at least 100 μg of a disclosed PPM1A inhibitor. For example, formulations may include about 0.1 mg, 0.2 mg, 0.3 mg, 0.4 mg, 0.5 mg, 1 mg, 5 mg, 10 mg, 15 mg, 20 mg, 25 mg, or 30 mg of a disclosed PPM1A inhibitor.

[0489] In some embodiments, methods described herein include administering at least 1 μg, at least 5 μg, at least 10 μg, at least 20 μg, at least 30 μg, at least 40 μg, at least 50 μg, at least 60 μg, at least 70 μg, at least 80 μg, at least 90 μg, or at least 100 μg of a PPM1A inhibitor, for example a PPM1A inhibitor. In some embodiments, methods of the invention include administering from 35 mg to 500 mg, from 1 mg to 10 mg, from 10 mg to 20 mg, from 20 mg to 30 mg, from 30 mg to 40 mg, from 40 mg to 50 mg, from 50 mg to 60 mg, from 60 mg to 70 mg, from 70 mg to 80 mg, from 80 mg to 90 mg, from 90 mg to 100 mg, from 100 mg to 150 mg, from 150 mg to 200 mg, from 200 mg to 250 mg, from 250 mg to 300 mg, from 300 mg to 350 mg, from 350 mg to 400 mg, from 400 mg to 450 mg, from 450 mg to 500 mg, from 500 mg to 600 mg, from 600 mg to 700 mg, from 700 mg to 800 mg, from 800 mg to 900 mg, from 900 mg to 1 g, from 1 mg to 50 mg, from 20 mg to 40 mg, or from 1 mg to 500 mg of a PPM1A inhibitor.

[0490] The amount administered will depend on variables such as the type and extent of disease or indication to be treated, the overall health and size of the patient, the in vivo potency of the PPM1A inhibitor, the pharmaceutical formulation, and the route of administration. The initial dosage can be increased beyond the upper level in order to rapidly achieve the desired blood-level or tissue level. Alternatively, the initial dosage can be smaller than the optimum, and the dosage may be progressively increased during the course of treatment. Human dosage can be optimized, e.g., in a conventional Phase I dose escalation study. Dosing frequency can vary, depending on factors such as route of administration, dosage amount and the disease being treated. Exemplary dosing frequencies are once per day, once per week and once every two weeks. In some embodiments, dosing is once per day for 7 days. In some embodiments, dosing is once per month. In some embodiments, dosing is once every 3 months.

[0491] Combination Therapies

[0492] In various embodiments, a PPM1A AON as disclosed herein can be administered in combination with one or more additional therapies. The combination therapy of the disclosed oligonucleotide and the one or more additional therapies can, in some embodiments, be synergistic in treating any of amyotrophic lateral sclerosis (ALS), frontotemporal dementia (FTD), ALS with FTD, Alzheimer's disease (AD), Parkinson's disease (PD), Huntington's disease, Brachial plexus injuries, peripheral nerve injuries, progressive supranuclear palsy (PSP), brain trauma, spinal cord injury, corticobasal degeneration (CBD) and/or neuropathies such a chemotherapy induced neuropathy, Spinocerebellar ataxia (SCA), Niemann-Pick disease type C (NPC), Charcot-Marie-Tooth Disease (CMT), Mucopolysaccharidosis type II (MPSIIA), Mucolipidosis IV, GM1 gangliosidosis, Sporadic inclusion body myositis (sIBM), Henoch-Schonlein purpura (HSP), or Gaucher's disease.

[0493] Example additional therapies for treating amyotrophic lateral sclerosis (ALS), frontotemporal dementia (FTD), or ALS with FTD include any of Riluzole (Rilutek), troriluzole, Edaravone (Radicava), rivastigmine, donepezil, galantamine, selective serotonin reuptake inhibitor, antipsychotic agents, cholinesterase inhibitors, memantine, benzodiazepine antianxiety drugs, AMX0035 (ELYBRIO®), ZILUCOPLAN (RA101495), dual AON intrathecal administration (e.g., BIIB067, BIIB078), BIIB100, levodopa/carbidopa, dopaminergic agents (e.g., ropinirole, pramipexole, rotigotine), medroxyprogesterone, KCNQ2/KCNQ3 openers, Pridopidine, PrimeC (combination of ciprofloxacin and Celebrex), lithium, or anticonvulsants and psychostimulant agents. Additional therapies can further include breathing care, physical therapy, occupational therapy, speech therapy, and nutritional support. In various embodiments, an additional therapy can be a second antisense oligonucleotide. As an example, the second antisense oligonucleotide may be a second PPM1A AON that targets a PPM1A transcript.

[0494] A combination therapy (e.g., in combination with a PPM1A AON) may be selected according to the disease that is to be treated. For example, for treating Alzheimer's Disease, any of Memantine, Rivastigmine, Galantamine, Donepezil, Aricept®, Exelon® (Rivastigmine), Razadyne®, Aducanumab, BAN2401, BIIB091 (gosuranemab), BIIB076, BIIB080 (IONIS-MAPTRx), Elayta (CT1812), MK1942, allogenic hMSC, nilotinib, A1BT-957, acitretin, ABT-354, GV1001, Riluzole, CAD106, CNP520, AD-35, Rilapladib, DHP1401, T-817 MA, TC-5619, TPI-287, RVT-101, LY450139, JNJ-54861911, Dapagliflozin, GSK239512, PF-04360365, ASP0777, SB-742457 (a 5-HT6 receptor antagonist), PF-03654746 (an H₃ receptor antagonist), GSK933776 (an Fc-inactivated anti-(3 amyloid (AD) monoclonal antibody (mAb)), Posiphen ((+)-phenserine tartrate), AMX0035 (ELYBRIO®), coenzyme Q10 or any combination thereof can be selected as an additional therapy.

[0495] For example for treating Parkinson's Disease, any of Levodopa, Carbidopa-levidopa, pramipexole, ropinirole, rotigotine, apomorphine, selegiline, rasagiline, entacapone, tolcapone, amantadine, trihexyphenidyl, BIIB054 (cinepanemab), BIIB094, BIIB118, ABBV-0805, zonisamide, deep brain stimulation, brain-derived neurotrophic factor, stem-cell transplant, Niacin, brain stein stimulation, nicotine, nabilone, PF-06649751, DNL201, LRRK2 inhibitors. CK1 inhibitors, isradipine, CLR4001, IRX4204, Yohimbine, coenzyme Q10, OXB-10, duloxetine, pioglitazone, preladenant, or any combination thereof can be selected as an additional therapy.

[0496] For example, for treating progressive supranuclear palsy (PSP), any of UCB0107, ABBV-8E12, F-18 AV1451, BIIB092, C-2N-8E12, tideglusib, deep transcranial magnetic stimulation, lipoic acid, tolfenamica acid, lithium, AZP2006, Glial Cell Line-Derived Neurotrophic Factor, NBMI, suvorxant, zolpidem, TPI 287, davunetide, pirnavanserin, Levodopa, Carbidopa-levidopa, pramipexole, ropinirole, rotigotine, apomorphine, selegiline, rasagiline, entacapone, toicapone, amantadine, trihexyphenidyl, BIIB054 (cinepanemab), BIIB094, BIIB118, ABBV-0805, zonisamide, deep brain stimulation, brain-derived neurotrophic factor, stem-cell transplant, Niacin, brain stem stimulation, nicotine, nabilone, PF-06649751, DNL201, LRRK2 inhibitors, CK1 inhibitors, isradipine, CLR4001, IRX4204, Yohimbine, coenzyme Q10, OXB-102, duloxetine, pioglitazone, preladenant, or any combination thereof can be selected as an additional therapy.

[0497] For example for treating Huntington's Disease, any of Tetrabenazine, deutetrabenazine, physical therapy, risperidone, haloperidol, chlorpromazine, clonazepam, diazepan, benzodiazepines, selective serotonin reuptake inhibitors, quetiapine, carbatrol, valproate, lamotrigine, pridopidine, delta-9-tetrahydrocannabinol, cannabidiol, stem-cell therapy, ISIS-443139, nilotinib, resveratrol, neflanapimod, fenofibrate, creatine, RO7234292, SAGE-718, WVE-120102, WVE-120101, dime bon, minocycline, deep brain stimulation, ursodiol, coenzyme Q10, OMS643762, VX15/2503, PF-02545920, BN82451B, SEN0014196, olanzapine, tiapridal (tiapride), or any combination thereof, can be selected as an additional therapy.

[0498] For example, for treating brain trauma, any of anticoagulants, antidepressants, muscle relaxants, stimulants, anticonvulsants, anti-anxiety medication, erythropoietin, hyperbaric treatment, rehabilitation therapies (e.g., physical, occupational, speech, psychological, or vocational counseling), or any combination thereof can be selected as an additional therapy.

[0499] For example, for treating spinal cord injury, any of AXER-204, glyburide, 5-hydroxytryptophan (5-HTP), L-3,4-dihydroxyphenylalanine (L-DOPA), or rehabilitation therapies (e.g., physical therapy, occupational therapy, recreational therapy, use of assistive devices, improved strategies for exercise and healthy diets), or any combination thereof can be selected as an additional therapy.

[0500] For example, for treating corticobasal degeneration, any of TPI-287, lithium, occupational, physical, and speech therapy, or any combination thereof can be selected as an additional therapy.

[0501] For example, for treating neuropathies, such as a chemotherapy induced neuropathy, any of gabapentin, pregabalin, lamotrigine, carbamazepine, duloxetine, gabapentinoids, tricyclic antidepressants, serotonin-norepinephrine reuptake inhibitors, opioids, neurotoxin, dextromethorphan, nicotinamide riboside, auto-antibodies targeting neuronal antigens (TS-HDS and FGFR3), or any combination thereof can be selected as an additional therapy.

[0502] For example, for treating spinocerebellar ataxia, any of troriluzole, BHV-4157, or a combination thereof can be selected as an additional therapy.

[0503] For example, for treating Niemann-Pick disease type C, any of anti-seizure medications, speech therapy, physical therapy, occupational therapy, Adrabetadex, Arimoclomol, N-Acetyl-L-Leucine, or any combination thereof can be selected as an additional therapy.

[0504] For example, for treating Charcot-Marie-Tooth Disease (CMT), any of physical and occupational therapies, orthopedic surgery, orthopedic devices, PXT3003, or any combination thereof can be selected as an additional therapy.

[0505] For example, for treating Mucopolysaccharidosis type II (MPSIIA), any of enzyme replacement therapy: idursulfase (Elaprase), surgical intervention (tonsillectomy and/or adenoidectomy), RGX-121 gene therapy, adalimumab, MT2013-31, or any combination thereof can be selected as an additional therapy.

[0506] For example, for treating Mucolipidosis IV, any of physical, occupational, and speech therapies, contact lenses and artificial tears, genetic counseling, or any combination thereof can be selected as an additional therapy.

[0507] For example, for treating GM1 gangliosidosis, any of anticonvulsants, physical and occupational therapies, galactosidase, gene delivery of galactosidase, LYS-GM101 gene therapy, or any combination thereof can be selected as an additional therapy.

[0508] For example, for treating Sporadic inclusion body myositis (sIBM), any of physical and occupational therapies, use of devices such as braces, walkers, wheelchairs, immunosuppressants, BYM338, or any combination thereof can be selected as an additional therapy.

[0509] For example, for treating Henoch-Schonlein purpura (HSP), any of corticosteroids, colchicine, dapsone, azathioprine, or any combination thereof can be selected as an additional therapy.

[0510] For example, for treating Gaucher's disease, any of enzyme replacement therapy, substrate reduction therapy, N-acetylcysteine, GZ/SAR402671, cerezyme, or any combination thereof can be selected as an additional therapy.

[0511] In various embodiments, the disclosed oligonucleotide and the one or more additional therapies can be conjugated to one another and provided in a conjugated form. Further description regarding conjugates involving the disclosed oligonucleotide is described below.

[0512] When administering a combination therapy to a patient in need of such administration, the therapeutic agents in the combination, or a pharmaceutical composition or compositions comprising the therapeutic agents, may be administered in any order such as, for example, sequentially, concurrently, together, simultaneously and the like. In various embodiments, the disclosed oligonucleotide and one or more additional therapies are provided concurrently. In various embodiments, the disclosed oligonucleotide and one or more additional therapies are provided simultaneously. In various embodiments, the disclosed oligonucleotide and one or more additional therapies are provided sequentially.

[0513] Conjugates

[0514] In certain embodiments, provided herein are oligomeric compounds, which comprise an oligonucleotide (e.g., PPM1A AON) and optionally one or more conjugate groups and/or terminal groups. Conjugate groups include one or more conjugate moiety and a conjugate linker which links the conjugate moiety to the oligonucleotide. Conjugate groups may be attached to either or both ends of an oligonucleotide and/or at any internal position. In certain embodiments, conjugate groups are attached to the 2-position of a nucleoside of a modified oligonucleotide. In certain embodiments, conjugate groups that are attached to either or both ends of an oligonucleotide are terminal groups. In certain such embodiments, conjugate groups or terminal groups are attached at the 3′ and/or 5′-end of oligonucleotides. In certain such embodiments, conjugate groups (or terminal groups) are attached at the 3′-end of oligonucleotides. In certain embodiments, conjugate groups are attached near the 3′-end of oligonucleotides. In certain embodiments, conjugate groups (or terminal groups) are attached at the 5′-end of oligonucleotides. In certain embodiments, conjugate groups are attached near the 5′-end of oligonucleotides.

[0515] Examples of terminal groups include but are not limited to conjugate groups, capping groups, phosphate moieties, protecting groups, modified or unmodified nucleosides, and two or more nucleosides that are independently modified or unmodified.

[0516] Conjugate Groups

[0517] In certain embodiments, a PPM1A AON is covalently attached to one or more conjugate groups. In certain embodiments, conjugate groups modify one or more properties of the attached oligonucleotide, including but not limited to pharmacodynamics, pharmacokinetics, stability, binding, absorption, tissue distribution, cellular distribution, cellular uptake, charge and clearance. In particular embodiments, conjugate groups modify the circulation time (e.g., increase) of the oligonucleotides in the bloodstream such that increased concentrations of the oligonucleotides are delivered to the brain. In particular embodiments, conjugate groups modify the residence time (e.g., increase residence time) of the oligonucleotides in a target organ (e.g., brain) such that increased residence time of the oligonucleotides improves their performance (e.g., efficacy). In particular embodiments, conjugate groups increase the delivery of the oligonucleotide to the brain through the blood brain barrier and/or brain parenchyma (e.g., through receptor mediated transcytosis). In particular embodiments, conjugate groups enable the oligonucleotide to target a specific organ (e.g., the brain). In certain embodiments, conjugate groups impart a new property on the attached oligonucleotide, e.g., fluorophores or reporter groups that enable detection of the oligonucleotide. Certain conjugate groups and conjugate moieties have been described previously, for example: cholesterol moiety (Letsinger et al., Proc. Natl. Acad. Sci. USA, 1989, 86, 6553-6556), cholic acid (Manoharan et al., Bioorg. Med. Chem. Lett., 1994, 4, 1053-1060), a thioether, e.g., hexyl-S-tritylthiol (Manoharan et al., Ann. NY. Acad. Sci., 1992, 660, 306-309; Manoharan et al., Bioorg. Med. Chem. Lett., 1993, 3, 2765-2770), a thiocholesterol (Oberhauser et al., Nucl. Acids Res., 1992, 20, 533-538), an aliphatic chain, e.g., do-decan-diol or undecyl residues (Saison-Behmoaras et al., EMBO J, 1991, 10, 1111-1118; Kabanov et al., FEBS Lett., 1990, 259, 327-330; Svinarchuk et al., Biochimie, 1993, 75, 49-54), a phospholipid, e.g., di-hexadecyl-rac-glycerol or triethyl-ammonium 1,2-di-O-hexadecyl-rac-glycero-3-H-phosphonate (Manoharan et al., Tetrahedron Lett., 1995, 36, 3651-3654; Shea et al., Nucl. Acids Res., 1990, 18, 3777-3783), a polyamine or a polyethylene glycol chain (Manoharan et al., Nucleosides & Nucleotides, 1995, 14, 969-973), or adamantane acetic acid a palmityl moiety (Mishra et al., Biochim. Biophys. Acta, 1995, 1264, 229-237), an octadecylamine or hexylamino-carbonyl-oxycholesterol moiety (Crooke et al., J. Pharmacol. Exp. Ther., 1996, 277, 923-937), a tocopherol group (Nishina et al., Molecular Therapy Nucleic Acids, 2015, 4, e220; and Nishina et al., Molecular Therapy, 2008, 16, 734-740), or a GalNAc cluster (e.g., WO2014/179620).

[0518] Conjugate Moieties

[0519] Conjugate moieties include, without limitation, intercalators, reporter molecules, polyamines, polyamides, peptides, carbohydrates, vitamin moieties, polyethylene glycols, thioethers, polyethers, cholesterols, thiocholesterols, cholic acid moieties, folate, lipids, phospholipids, biotin, phenazine, phenanthridine, anthraquinone, adamantane, acridine, fluoresceins, rhodamines, coumarins, fluorophores, and dyes. In particular embodiments, conjugate moieties are selected from a peptide, a lipid, N-acetylgalactosamine (GalNAc), cholesterol, vitamin E, lipoic acid, panthothenic acid, polyethylene glycol, an antibody (e.g., an antibody for crossing the blood brain barrier such as anti-transferrin receptor antibody), or a cell-penetrating peptide (e.g., transactivator of transcription (TAT) and penetratine).

[0520] In certain embodiments, a conjugate moiety comprises an active drug substance, for example, aspirin, warfarin, phenylbutazone, ibuprofen, suprofen, fen-bufen, ketoprofen, (S)-(+)-pranoprofen, carprofen, dansylsarcosine, 2,3,5-triiodobenzoic acid, fingolimod, flufenamic acid, folinic acid, a benzothiadiazide, chlorothiazide, a diazepine, indomethacin, a barbiturate, a cephalosporin, a sulfa drug, an antidiabetic, an antibacterial or an antibiotic.

[0521] Conjugate Linkers

[0522] Conjugate moieties are attached to a PPM1A AON through conjugate linkers. In certain oligomeric compounds, the conjugate linker is a single chemical bond (e.g., the conjugate moiety is attached directly to an oligonucleotide through a single bond). In certain embodiments, the conjugate linker comprises a chain structure, an oligomer of repeating units such as ethylene glycol, nucleosides, or amino acid units.

[0523] In certain embodiments, a conjugate linker comprises one or more groups selected from alkyl, amino, oxo, amide, disulfide, polyethylene glycol, ether, thioether, and hydroxylamino. In certain such embodiments, the conjugate linker comprises groups selected from alkyl, amino, oxo, amide and ether groups. In certain embodiments, the conjugate linker comprises groups selected from alkyl and amide groups. In certain embodiments, the conjugate linker comprises groups selected from alkyl and ether groups. In certain embodiments, the conjugate linker comprises at least one phosphorus moiety. In certain embodiments, the conjugate linker comprises at least one phosphate group. In certain embodiments, the conjugate linker includes at least one neutral linking group.

[0524] In certain embodiments, conjugate linkers, including the conjugate linkers described above, are bifunctional linking moieties, e.g., those known in the art to be useful for attaching conjugate groups to parent compounds, such as the oligonucleotides provided herein. In general, a bifunctional linking moiety comprises at least two functional groups. One of the functional groups is selected to bind to a particular site on a parent compound and the other is selected to bind to a conjugate group. Examples of functional groups used in a bifunctional linking moiety include but are not limited to electrophiles for reacting with nucleophilic groups and nucleophiles for reacting with electrophilic groups. In certain embodiments, bifunctional linking moieties comprise one or more groups selected from amino, hydroxyl, carboxylic acid, thiol, alkyl, alkenyl, and alkynyl.

[0525] Examples of conjugate linkers include but are not limited to pyrrolidine, 8-amino-3,6-dioxaoctanoic acid (ADO), succinimidyl 4-(N-maleimidomethyl) cyclohexane-1-carboxylate (SMCC) and 6-aminohexanoic acid (AHEX or AHA). Other conjugate linkers include but are not limited to substituted or unsubstituted C₁-C₁₀ alkyl, substituted or unsubstituted C₂-C₁₀ alkenyl or substituted or unsubstituted C₂-C₁₀ alkynyl, wherein a nonlimiting list of preferred substituent groups includes hydroxyl, amino, alkoxy, carboxy, benzyl, phenyl, nitro, thiol, thioalkoxy, halogen, alkyl, aryl, alkenyl and alkynyl.

[0526] In certain embodiments, conjugate linkers comprise 1-10 linker-nucleosides. In certain embodiments, conjugate linkers comprise 2-5 linker-nucleosides. In certain embodiments, conjugate linkers comprise 3 linker-nucleosides.

[0527] In certain embodiments, such linker-nucleosides are modified nucleosides. In certain embodiments such linker-nucleosides comprise a modified sugar moiety. In certain embodiments, linker-nucleosides are unmodified. In certain embodiments, linker-nucleosides comprise an optionally protected heterocyclic base selected from a purine, substituted purine, pyrimidine or substituted pyrimidine. In certain embodiments, a cleavable moiety is a nucleoside selected from uracil, thymine, cytosine, 4-N-benzoylcytosine, 5-methylcytosine, 4-N-benzoyl-5-methyl cytosine, adenine, 6-N-benzoyladenine, guanine and 2-N-isobutyrylguanine. It is typically desirable for linker-nucleosides to be cleaved from the oligomeric compound after it reaches a target tissue. Accordingly, linker-nucleosides are typically linked to one another and to the remainder of the oligomeric compound through cleavable bonds. In certain embodiments, such cleavable bonds are phosphodiester bonds.

[0528] Herein, linker-nucleosides are not considered to be part of the oligonucleotide. Accordingly, in embodiments in which an oligomeric compound comprises an oligonucleotide consisting of a specified number or range of linked nucleosides and/or a specified percent complementarity to a reference nucleic acid and the oligomeric compound also comprises a conjugate group comprising a conjugate linker comprising linker-nucleosides, those linker-nucleosides are not counted toward the length of the oligonucleotide and are not used in determining the percent complementarity of the oligonucleotide for the reference nucleic acid.

[0529] In certain embodiments, it is desirable for a conjugate group to be cleaved from the PPM1A AON. For example, in certain circumstances oligomeric compounds comprising a particular conjugate moiety are better taken up by a particular cell type, but once the oligomeric compound has been taken up, it is desirable that the conjugate group be cleaved to release the unconjugated or parent oligonucleotide. Thus, certain conjugate linkers may comprise one or more cleavable moieties. In certain embodiments, a cleavable moiety is a cleavable bond. In certain embodiments, a cleavable moiety is a group of atoms comprising at least one cleavable bond. In certain embodiments, a cleavable moiety comprises a group of atoms having one, two, three, four, or more than four cleavable bonds. In certain embodiments, a cleavable moiety is selectively cleaved inside a cell or subcellular compartment, such as a lysosome. In certain embodiments, a cleavable moiety is selectively cleaved by endogenous enzymes, such as nucleases.

[0530] In certain embodiments, a cleavable bond is selected from among: an amide, an ester, an ether, one or both esters of a phosphodiester, a phosphate ester, a carbamate, or a disulfide. In certain embodiments, a cleavable bond is one or both of the esters of a phosphodiester. In certain embodiments, a cleavable moiety comprises a phosphate or phosphodiester. In certain embodiments, the cleavable moiety is a phosphate linkage between an oligonucleotide and a conjugate moiety or conjugate group.

[0531] In certain embodiments, a cleavable moiety comprises or consists of one or more linker-nucleosides. In certain such embodiments, the one or more linker-nucleosides are linked to one another and/or to the remainder of the oligomeric compound through cleavable bonds. In certain embodiments, such cleavable bonds are unmodified phosphodiester bonds. In certain embodiments, a cleavable moiety is 2′-deoxy nucleoside that is attached to either the 3′ or 5′-terminal nucleoside of an oligonucleotide by a phosphate internucleoside linkage and covalently attached to the remainder of the conjugate linker or conjugate moiety by a phosphate or phosphorothioate linkage. In certain such embodiments, the cleavable moiety is 2′-deoxy adenosine.

[0532] Terminal Groups

[0533] In certain embodiments, oligomeric compounds comprise one or more terminal groups. In certain such embodiments, oligomeric compounds comprise a stabilized 5′-phosphate. Stabilized 5′-phosphates include, but are not limited to 5′-phosphonates, including, but not limited to 5′-vinylphosphonates. In certain embodiments, terminal groups comprise one or more abasic nucleosides and/or inverted nucleosides. In certain embodiments, terminal groups comprise one or more 2′-linked nucleosides. In certain such embodiments, the 2′-linked nucleoside is an abasic nucleoside.

[0534] Diagnostic Methods

[0535] The disclosure also provides a method of diagnosing a patient with a neurological disease that relies upon detecting levels of PPM1A expression signal in one or more biological samples of a patient. As used herein, the term “PPM1A expression signal” can refer to any indication of PPM1A gene expression, or gene or gene product activity. PPM1A gene products include RNA (e.g., mRNA), peptides, and proteins. Indices of PPM1A gene expression that can be assessed include, but are not limited to, PPM1A gene or chromatin state, PPM1A gene interaction with cellular components that regulate gene expression, PPM1A gene product expression levels (e.g., PPM1A RNA expression levels, PPM1A protein expression levels), or interaction of PPM1A RNA or protein with transcriptional, translational, or post-translational processing machinery. Indices of PPM1A gene product activity include, but are not limited to, assessment of PPM1A signaling activity (e.g., assessment of TBK1 activation or phosphorylation).

[0536] Detection of PPM1A expression signal may be accomplished through in vivo, in vitro, or ex vivo methods. In a preferred embodiment, methods of the disclosure may be carried out in vitro. Methods of detecting may involve detection in blood, serum, fecal matter, tissue, cerebrospinal fluid, spinal fluid, extracellular vesicles (for example, CSF exosomes), or cells of a patient. Detection may be achieved by measuring PPM1A expression signal in whole tissue, tissue explants, cell cultures, dissociated cells, cell extract, extracellular vesicles (for example, CSF exosomes), or body fluids, including blood, spinal fluid, cerebrospinal fluid, urine, lymphatic fluid, or serum. Biochemical assays that examine protein or RNA expression may also be used for detection. For instance, one may evaluate levels of a protein (e.g., TBK1 or levels of another protein or gene product) indicative of a neurological disease, in dissociated cells or non-dissociated tissue via immunocytochemical, immunohistochemical, Western blotting, or Northern blotting methods, or methods useful for evaluating RNA levels such as quantitative or semi-quantitative polymerase chain (e.g., digital PCR (DigitalPCR, dPCR, or dePCR), qPCR etc.) reaction.

[0537] One may also evaluate the presence or level of expression of useful biomarkers (e.g., neurofilament light (NEFL), neurofilament heavy (NEFH), TDP-43 or p75 extracellular domain (p75^{ECD})) found in spinal cord fluid, cerebrospinal fluid, plasma, extracellular vesicles (for example, exosome-like cerebrospinal fluid extracellular vesicles (“CSF exosomes”), such as those described in Welton et al., (2017) “Cerebrospinal fluid extracellular vesicle enrichment for protein biomarker discovery in neurological disease; multiple sclerosis” J Extracell Vesicles., 6(1):1-10; and Street et al., (2012) “Identification and proteomic profiling of exosomes in human cerebrospinal fluid” J Transl. Med., 10:5), urine, fecal matter, lymphatic fluid, blood, plasma, or serum to evaluate disease state. Additional measurements may include strength duration time constant (SDTC), short interval cortical inhibition (SICI), dynamometry, accurate test of limb isometric strength (ATLIS), compound muscle action potential (bio), and ALSFRS-R. In certain embodiments, urinary neurotrophin receptor p75 extracellular domain (p75^{ECD}) is a disease progression and prognostic biomarker in amyotrophic lateral sclerosis (ALS). Phosphorylated neurofilament heavy chain (pNFH) in cerebrospinal fluid (CSF) predict disease status and survival in C9ORF72-associated amyotrophic lateral sclerosis (c9ALS) patients. CSF pNFH can serve as a prognostic biomarker for clinical trials, which will increase the likelihood of successfully developing a treatment for c9ALS.

[0538] In some embodiments, diagnosing a patient with a neurological disease such as Alzheimer's disease can involve evaluating mental performance of the patient. Evaluation of mental performance can involve a Mini-Mental State Examination (MMSE). Additional examples for measuring mental performance include the Functional Assessment Staging Test (FAST), the Motor Screening Task, Paired Associates Learning, Spatial Working Memory, Reaction time, Rapid Visual Information Processing, Delayed Matching to Sample, and Pattern Recognition Memory In some embodiments, diagnosing a patient with a neurological disease such as Parkinson's disease involves implementing the Unified Parkinson's Disease Rating Scale (UPDRS) as the performance measure. Other measures for quantifying aspects of functional performance not measured by the UPDRS can include the Berg Balance Scale (BBS), Forward Functional Reach Test (FFR), Backward Functional Reach Test (BFR), Timed “Up & Go” Test (TUG), and gait speed.

### Additional Embodiments

[0539] Disclosed herein is a Protein Phosphatase 1A (PPM1A) antisense oligonucleotide comprising a nucleotide sequence complementary to a nucleotide sequence of nucleotide 41,932 to nucleotide 42,787 and from nucleotide 44,871 to nucleotide 44,990 of a PPM1A gene sequence (SEQ ID NO: 1), or a portion thereof. Additionally disclosed herein is a Protein Phosphatase 1A (PPM1A) antisense oligonucleotide comprising the nucleotide sequence of SEQ ID NO: 2895 (5′ XYYZYTTGAGTCTCCXYXWZ 3′), or a pharmaceutically acceptable salt thereof, wherein W is 2′-O-(2-methoxyethyl)guanosine, X is 2′-O-(2-methoxyethyl)adenosine, Y is 2′-O-(2-methoxyethyl)cytosine, and Z is 2′-O-(2-methoxyethyl)thymidine. Additionally disclosed herein is a Protein Phosphatase 1A (PPM1A) antisense oligonucleotide comprising the nucleotide sequence of SEQ ID NO: 2900 (5′ ZYZYYAGCGGATTACZZWWZ 3′), or a pharmaceutically acceptable salt thereof, wherein W is 2′-O-(2-methoxyethyl)guanosine, Y is 2′-O-(2-methoxyethyl)cytosine, and Z is 2′-O-(2-methoxyethyl)thymidine. Additionally disclosed herein is a Protein Phosphatase 1A (PPM1A) antisense oligonucleotide comprising the nucleotide sequence of SEQ ID NO: 2905 (5′ XWYYXGAGAGCCATTYXYXY 3′), or a pharmaceutically acceptable salt thereof, wherein W is 2′-O-(2-methoxyethyl)guanosine, X is 2′-O-(2-methoxyethyl)adenosine, and Y is 2′-O-(2-methoxyethyl)cytosine. Additionally disclosed herein is a Protein Phosphatase 1A (PPM1A) antisense oligonucleotide comprising the nucleotide sequence of SEQ ID NO: 2907 (5′ WYYYZCGATACAGCCXWXWX 3′), or a pharmaceutically acceptable salt thereof, wherein W is 2′-O-(2-methoxyethyl)guanosine, X is 2′-O-(2-methoxyethyl)adenosine, Y is 2′-O-(2-methoxyethyl)cytosine, and Z is 2′-O-(2-methoxyethyl)thymidine. Additionally disclosed herein is a Protein Phosphatase 1A (PPM1A) antisense oligonucleotide comprising the nucleotide sequence of SEQ ID NO: 2911 (5′ YYZZYTTCACTGCTTYZWWY 3′), or a pharmaceutically acceptable salt thereof, wherein W is 2′-O-(2-methoxyethyl)guanosine, Y is 2′-O-(2-methoxyethyl)cytosine, and Z is 2′-O-(2-methoxyethyl)thymidine. Additionally disclosed herein is a Protein Phosphatase 1A (PPM1A) antisense oligonucleotide comprising the nucleotide sequence of SEQ ID NO: 2893 (5′ ZYZYYACAGTTAATGXXXZX 3′), or a pharmaceutically acceptable salt thereof, wherein Y is 2′-O-(2-methoxyethyl)cytosine, X is 2′-O-(2-methoxyethyl)adenosine, and Z is 2′-O-(2-methoxyethyl)thymidine.

[0540] In some embodiments, at least one nucleoside linkage of the nucleotide sequence is selected from the group consisting of a phosphorothioate linkage, a phosphorodithioate linkage, a phosphotriester linkage, an alkylphosphonate linkage, an aminoalkylphosphotriester linkage, an alkylene phosphonate linkage, a phosphinate linkage, a phosphoramidate linkage, an aminoalkylphosphoramidate linkage, a thiophosphoramidate linkage, a thionoalkylphosphonate linkage, a thionoalkylphosphotriester linkage, a thiophosphate linkage, a selenophosphate linkage, and a boranophosphate linkage. In some embodiments, at least one internucleoside linkage of the nucleotide sequence is a phosphorothioate linkage. In some embodiments, all internucleoside linkages of the nucleotide sequence are phosphorothioate linkages.

[0541] Additionally disclosed herein is a pharmaceutical composition comprising the antisense oligonucleotide described above, or a pharmaceutically acceptable salt thereof, and a pharmaceutically acceptable excipient.

[0542] Additionally disclosed herein is a method of treating a neurological disease in a patient in need thereof, the method comprising administering to the patient a PPM1A inhibitor. In various embodiments, the neurological disease is selected from the group consisting of amyotrophic lateral sclerosis (ALS), frontotemporal dementia (FTD), Alzheimer's disease (AD), Parkinson's disease (PD), Huntington's disease, progressive supranuclear palsy (PSP), brain trauma, spinal cord injury, and corticobasal degeneration (CBD).

[0543] Additionally disclosed herein is a method of restoring autophagy in a cell, the method comprising exposing the cell to a PPM1A inhibitor. Additionally disclosed herein is a method of increasing TBK1 ser172 phosphorylation in a cell, the method comprising exposing the cell to a PPM1A inhibitor. Additionally disclosed herein is a method of increasing TBK1 function in a cell, the method comprising exposing the cell to a PPM1A inhibitor. Additionally disclosed herein is a method of inhibiting PPM1A in a cell, the method comprising exposing the cell to a PPM1A inhibitor.

[0544] In various embodiments, the cell is a cell of a patient in need of treatment of a neurological disease. In various embodiments, the neurological disease is selected from the group consisting of amyotrophic lateral sclerosis (ALS), frontotemporal dementia (FTD), Alzheimer's disease (AD), Parkinson's disease (PD), Huntington's disease, progressive supranuclear palsy (PSP), brain trauma, spinal cord injury, and corticobasal degeneration (CBD).

[0545] In various embodiments, the exposing is performed in vivo or ex vivo. In various embodiments, the exposing comprises administering the PPM1A inhibitor to a patient in need thereof. In various embodiments, the PPM1A inhibitor is administered topically, parenterally, intrathecally, intracisternally, orally, rectally, buccally, sublingually, vaginally, pulmonarily, intratracheally, intranasally, transdermally, or intraduodenally. In various embodiments, the PPM1A inhibitor is administered orally.

[0546] In various embodiments, a therapeutically effective amount of the PPM1A inhibitor is administered. In various embodiments, the patient is a human. In various embodiments, the PPM1A inhibitor comprises the PPM1A antisense oligonucleotide described above, or a pharmaceutically acceptable salt thereof.

[0547] In various embodiments, the PPM1A inhibitor is selected from the group consisting of a PPM1A small hairpin RNA (shRNA), a PPM1A small interfering RNA (siRNA), a PPM1A peptide nucleic acid (PNA), a PPM1A locked nucleic acid (LNA), and a PPM1A morpholino oligomer. In various embodiments, the pharmaceutical composition is suitable for topical, intrathecal, parenteral, oral, pulmonary, intratracheal, intranasal, transdermal, rectal, buccal, sublingual, vaginal, or intraduodenal administration.

[0548] Additionally disclosed herein is a use of a PPM1A inhibitor in the manufacture of a medicament for the treatment of neurological disease. In various embodiments, the neurological disease is selected from the group consisting of amyotrophic lateral sclerosis (ALS), frontotemporal dementia (FTD), Alzheimer's disease (AD), Parkinson's disease (PD), Huntington's disease, progressive supranuclear palsy (PSP), brain trauma, spinal cord injury, and corticobasal degeneration (CBD). In various embodiments, the PPM1A inhibitor is the PPM1A antisense oligonucleotide described above.

[0549] Additionally disclosed herein is a method of treating a neurological disease in a patient in need thereof, the method comprising administering to a patient in need thereof a therapeutically effective amount of a pharmaceutical composition comprising a PPM1A inhibitor, and a pharmaceutically acceptable excipient. In various embodiments, the neurological disease is selected from the group consisting of amyotrophic lateral sclerosis (ALS), frontotemporal dementia (FTD), Alzheimer's disease (AD), Parkinson's disease (PD), Huntington's disease, progressive supranuclear palsy (PSP), brain trauma, spinal cord injury, and corticobasal degeneration (CBD). In various embodiments, the PPM1A inhibitor is the PPM1A antisense oligonucleotide of any one of claims 1-10, or a pharmaceutically acceptable salt thereof. In various embodiments, the PPM1A inhibitor is selected from the group consisting of a PPM1A small hairpin RNA (shRNA), a PPM1A small interfering RNA (siRNA), a PPM1A peptide nucleic acid (PNA), a PPM1A locked nucleic acid (LNA), and a PPM1A morpholino oligomer.

[0550] In various embodiments, the pharmaceutical composition is administered topically, parenterally, orally, pulmonarily, rectally, buccally, sublingually, vaginally, intratracheally, intranasally, intrathecally, intracisternally, transdermally, or intraduodenally. In various embodiments, the pharmaceutical composition is administered orally. In various embodiments, the patient is human.

[0551] Additionally disclosed herein is a PPM1A antisense oligonucleotide described above, or a pharmaceutically acceptable salt thereof, for use as a medicament. Additionally disclosed herein is a PPM1A antisense oligonucleotide described above, or a pharmaceutically acceptable salt thereof, for use in the treatment of a neurological disease. In various embodiments, said neurological disease is selected from the group consisting of amyotrophic lateral sclerosis (ALS), frontotemporal dementia (FTD), Alzheimer's disease (AD), Parkinson's disease (PD), Huntington's disease, progressive supranuclear palsy (PSP), brain trauma, spinal cord injury, and corticobasal degeneration (CBD).

[0552] Additionally disclosed herein is a Protein Phosphatase 1A (PPM1A) antisense oligonucleotide selected from the group consisting of a PPM1A antisense oligonucleotide comprising the nucleotide sequence of SEQ ID NO: 450 (5′ ACCTCTTGAGTCTCCACAGT 3′), a PPM1A antisense oligonucleotide comprising the nucleotide sequence of SEQ ID NO: 517 (5′ TCTCCAGCGGATTACTTGGT 3′), a PPM1A antisense oligonucleotide comprising the nucleotide sequence of SEQ ID NO: 579 (5′ AGCCAGAGAGCCATTCACAC 3′), a PPM1A antisense oligonucleotide comprising the nucleotide sequence of SEQ ID NO: 590 (5′ GCCCTCGATACAGCCAGAGA 3′), a PPM1A antisense oligonucleotide comprising the nucleotide sequence of SEQ ID NO: 916 (5′ CCTTCTTCACTGCTTCTGGC 3′), or a pharmaceutically acceptable salt thereof, and a PPM1A antisense oligonucleotide comprising the nucleotide sequence of SEQ ID NO: 440 (5′ TCTCCACAGTTAATGAAATA 3′), or a pharmaceutically acceptable salt thereof; wherein at least one nucleoside linkage of the nucleotide sequence is selected from the group consisting of: a phosphorothioate linkage, a phosphorodithioate linkage, a phosphotriester linkage, an alkylphosphonate linkage, a methylphosphonate linkage, a dimethylphosphonate linkage, an aminoalkylphosphotriester linkage, an alkylene phosphonate linkage, a phosphinate linkage, a phosphoramidate linkage, a phosphorodiamidate linkage, an aminoalkylphosphoramidate linkage, a thiophosphoramidate linkage, a thionoalkylphosphonate linkage, a thionoalkylphosphotriester linkage, a thiophosphate linkage, a selenophosphate linkage, and a boranophosphate linkage; and/or wherein at least one nucleoside is substituted with a component selected from the group consisting of a 2′-O-(2-methoxyethyl) nucleoside, a 2′-O-methyl nucleoside, a 2′-deoxy-2′-fluoro nucleoside, a 2′-fluoro-β-D-arabinonucleoside, a locked nucleic acid (LNA), and a peptide nucleic acid (PNA).

[0553] In various embodiments, at least one internucleoside linkage of the nucleotide sequence is a phosphorothioate linkage. In various embodiments, all internucleoside linkages of the nucleotide sequence are phosphorothioate linkages.

[0554] Additionally disclosed herein is a pharmaceutical composition comprising the antisense oligonucleotide described above, or a pharmaceutically acceptable salt thereof, and a pharmaceutically acceptable excipient. Additionally disclosed herein is a Protein Phosphatase 1A (PPM1A) antisense oligonucleotide comprising a nucleic acid sequence that shares at least 90% identity with a continuous 10 nucleobase sequence of SEQ ID NOs: 2-955 or SEQ ID NOs: 1910-2863. In various embodiments, the nucleic acid sequence shares at least 90% identity with a continuous 11, 12, 13, 14, 15, 16, or 17 nucleobase sequence of SEQ ID NOs: 2-955 or SEQ ID NOs: 1910-2863.

[0555] Additionally disclosed herein is a PPM1A antisense oligonucleotide of any one of SEQ ID NOs: 2-955 or SEQ ID NOs: 1910-2863. Additionally disclosed herein is a pharmaceutical composition comprising a PPM1A antisense oligonucleotide of any one of SEQ ID NOs: 2-955 or SEQ ID NOs: 1910-2863, and a pharmaceutically acceptable excipient.

[0556] In various embodiments, at least one nucleoside linkage of the antisense oligonucleotide sequence is selected from the group consisting of: a phosphorothioate linkage, a phosphorodithioate linkage, a phosphotriester linkage, an alkylphosphonate linkage, a methylphosphonate linkage, a dimethylphosphonate linkage, an aminoalkylphosphotriester linkage, an alkylene phosphonate linkage, a phosphinate linkage, a phosphoramidate linkage, a phosphorodiamidate linkage, an aminoalkylphosphoramidate linkage, a thiophosphoramidate linkage, a thionoalkylphosphonate linkage, a thionoalkylphosphotriester linkage, a thiophosphate linkage, a selenophosphate linkage, and a boranophosphate linkage; and/or wherein at least one nucleoside is substituted with a component selected from the group consisting of a 2′-O-(2-methoxyethyl) nucleoside, a 2′-O-methyl nucleoside, a 2′-deoxy-2′-fluoro nucleoside, a 2′-fluoro-β-D-arabinonucleoside, a locked nucleic acid (LNA), and a peptide nucleic acid (PNA). In various embodiments, at least one internucleoside linkage of the nucleotide sequence is a phosphorothioate linkage. In various embodiments, all internucleoside linkages of the nucleotide sequence are phosphorothioate linkages.

[0557] Additionally disclosed herein is a PPM1A antisense oligonucleotide or a pharmaceutical composition for use in the treatment of a neurological disease. In various embodiments, said neurological disease is selected from the group consisting of amyotrophic lateral sclerosis (ALS), frontotemporal dementia (FTD), Alzheimer's disease (AD), Parkinson's disease (PD), Huntington's disease, progressive supranuclear palsy (PSP), brain trauma, spinal cord injury, and corticobasal degeneration (CBD).

### EXAMPLES

[0558] The disclosure is further illustrated by the following examples. The examples are provided for illustrative purposes only, and are not to be construed as limiting the scope or content of the disclosure in any way.

### Example 1: Design and Selection of PPM1A Antisense Oligonucleotides

[0559] Analysis of a human PPM1A mRNA sequence (NCBI Reference Sequence: NM_021003.5; SEQ ID NO: 2864) revealed 7,776 potential PPM1A AON candidate sequences. However, the majority of candidates did not meet the candidate filtering thresholds due to variability in the 5′UTR and 3′UTR sequences of the different PPM1A splice variants. A region spanning nucleotides 457 to 1410 of NM_021003.5 was identified as common to all known PPM1A splice variants. PPM1A AON candidates were identified that met the aforementioned filtering criteria and that target this region.

[0560] As used in the subsequent Examples, descriptions, and corresponding Figures, each PPM1A AON is identified using a “Legacy ID.” The Legacy ID of a PPM1A AON includes the notation of “QPA-” appended with the start position of the PPM1A transcript (specifically PPM1A transcript of SEQ ID NO: 2864) that the PPM1A AON is complementary to. For example, the PPM1A AON of SEQ ID NO: 2868 (5′ WYZWYTTAGCCCATAZYWYX 3′) is complementary to positions 542-561 of the PPM1A transcript of SEQ ID NO: 2864, where position 542 is the start position. Thus, the PPM1A AON of SEQ ID NO: 2868 is referred to below as QPA-542.

[0561] Table 5 below documents the PPM1A AON candidates that were designed and subsequently evaluated for ability to knockdown PPM1A expression. Additional development involved generating PPM1A AON candidates with a cholesterol conjugate group located on the 3′ end of the PPM1A AON. The PPM1A AON candidates with a cholesterol conjugate group are shown below in Table 6.

TABLE 5
Evaluated PPM1A AONs

| SEQ | | Oligonucleotide |
|---|---|---|
| ID NO: | Legacy ID | Sequence (5′→3′)*# |
| 2868 | QPA-542 | WYZWYTTAGCCCATAZYWYX |
| 2869 | QPA-555 | WYYXWCCTTGCATGCZWYZZ |
| 2870 | QPA-559 | XYXYWCCAGCCTTGCXZWYZ |
| 2871 | QPA-599 | ZWWYXAACCGATCACXWYYW |
| 2872 | QPA-602 | XYZZWGCAAACCGATYXYXW |
| 2873 | QPA-603 | YXYZZGGCAAACCGAZYXYX |
| 2874 | QPA-604 | YYXYZTGGCAAACCGXZYXY |
| 2875 | QPA-605 | ZYYXYTTGGCAAACCWXZYX |
| 2876 | QPA-606 | WZYYXCTTGGCAAACYWXZY |
| 2877 | QPA-607 | XWZYYACTTGGCAAAYYWXZ |
| 2878 | QPA-608 | XXWZYCACTTGGCAAXYYWX |
| 2879 | QPA-609 | YXXWZCCACTTGGCAXXYYW |
| 2880 | QPA-625 | XXWXXTGACCACGATZYXXW |
| 2881 | QPA-642 | WYYYXTCATACACAGYXXXW |
| 2882 | QPA-644 | XZWYYCATCATACACXWYXX |
| 2883 | QPA-646 | WYXZWCCCATCATACXYXWY |
| 2884 | QPA-648 | YXWYXTGCCCATCATXYXYX |
| 2885 | QPA-650 | XYYXWCATGCCCATCXZXYX |
| 2886 | QPA-652 | WXXYYAGCATGCCCAZYXZX |
| 2887 | QPA-655 | ZWXWXACCAGCATGCYYXZY |
| 2888 | QPA-656 | YZWXWAACCAGCATGYYYXZ |
| 2889 | QPA-708 | YYZWWTTATTGGTGAZWZWX |
| 2890 | QPA-709 | ZYYZWGTTATTGGTGXZWZW |
| 2891 | QPA-794 | YXZWZGTTCATCAATYZYYX |
| 2892 | QPA-795 | ZYXZWTGTTCATCAAZYZYY |
| 2893 | QPA-895 | ZYZYYACAGTTAATGXXXZX |
| 2894 | QPA-900 | ZZWXWTCTCCACAGTZXXZW |
| 2895 | QPA-905 | XYYZYTTGAGTCTCCXYXWZ |
| 2896 | QPA-910 | XWZXXACCTCTTGAGZYZYY |
| 2897 | QPA-915 | ZXYXXAGTAAACCTCZZWXW |
| 2898 | QPA-962 | XZZXYTTGGTTTGTGXZYZZ |
| 2899 | QPA-967 | XWYWWATTACTTGGTZZWZW |
| 2900 | QPA-972 | ZYZYYAGCGGATTACZZWWZ |
| 2901 | QPA-977 | ZZYZZTCTCCAGCGGXZZXY |
| 2902 | QPA-987 | ZYZWXATTCGTTCTTZYZYY |
| 2903 | QPA-1025 | WYYXZTCACACGCTGXXZYX |
| 2904 | QPA-1030 | XWXWXGCCATTCACAYWYZW |
| 2905 | QPA-1034 | XWYYXGAGAGCCATTYXYXY |
| 2906 | QPA-1040 | YWXZXCAGCCAGAGAWYYXZ |
| 2907 | QPA-1045 | WYYYZCGATACAGCCXWXWX |
| 2908 | QPA-1098 | WYZWYTCAGTAGGACYZZZZ |
| 2909 | QPA-1361 | ZWYZZCTGGCGATACZZZWW |
| 2910 | QPA-1366 | ZZYXYTGCTTCTGGCWXZXY |
| 2911 | QPA-1371 | YYZZYTTCACTGCTTYZWWY |
| 2912 | QPA-1378 | ZYZWYCTCCTTCTTCXYZWY |
| 2913 | QPA-1386 | ZWZYYAACTCTGCCTYYZZY |

*In each of the oligonucleotide sequences included
in Table 5, the individual nucleosides are as
follows: A is adenosine, G is guanosine, C is
cytosine, T is thymidine, W is
2′-O-(2-methoxyethyl)guanosine, X is
2′-O-(2-methoxyethyl)adenosine, Y is
2′-O-(2-methoxyethyl)-5-methylcytosine, and Z is
2′-O-(2-methoxyethyl)thymidine.
#In each of the oligonucleotide sequences included
in Table 5, the individual nucleosides are each
linked by a phosphorothioate bond.

TABLE 6
Additional Evaluated PPM1A AONs with a
cholesterol conjugate group on 3′ end of the AON

| SEQ | | Oligonucleotide |
|---|---|---|
| ID NO: | Legacy ID | Sequence (5′→3′)*#^ |
| 2876 | QPA-606-C | WZYYXCTTGGCAAACYWXZY |
| 2881 | QPA-642-C | WYYYXTCATACACAGYXXXW |
| 2882 | QPA-644-C | XZWYYCATCATACACXWYXX |

*In each of the oligonucleotide sequences included
in Table 6, the individual nucleosides are as follows:
A is adenosine, G is guanosine, C is cytosine, T
is thymidine, W is 2′-O-(2-methoxyethyl)guanosine,
is 2′-O-(2-methoxyethyl)adenosine, Y is
2′-O-(2-methoxyethyl)-5-methylcytosine, and Z is
2′-O-(2-methoxyethyl)thymidine.
#In each of the oligonucleotide sequences included
in Table 6, the individual nucleosides are each
linked by a phosphorothioate bond.
^In each of the oligonucleotide sequences in Table 6,
a cholesterol conjugate group is located on the 3′
end of the oligonucleotide.

### Example 2: Analysis of PPM1A AON Knockdown Efficacy

[0562] A subset of the PPM1A AONs shown above in Tables 5 and 6 (specifically QPA-905, QPA-972, QPA-1034, QPA-1045, and QPA-1371) were evaluated by screening for PPM1A mRNA knockdown using reverse transcription quantitative polymerase chain reaction (RT-qPCR) analysis. To analyze the knockdown efficacy of PPM1A AONs, cells from the lymphoblastoid cell line BP6074 were transfected with either Lipofectamine 3000 transfection reagent (Thermo Fisher Scientific, Waltham, Mass., USA) alone or with Lipofectamine 3000 and varying amounts (5 nM, 20 nM, 50 nM, 200 nM, or 500 nM) of one of the PPM1A AON's listed in Tables 5 or 6. The BP6074 cell line is derived from a 48 year-old male ALS patient, and harbors a TBK1 protein-truncating mutation (C992+1 G>A) that results in a frameshift and decreased TBK1 protein expression (see van der Zee et al. (2017) “TBK1 Mutation Spectrum in an Extended European Patient Cohort with Frontotemporal Dementia and Amyotrophic Lateral Sclerosis” Hum Mutat. 38(3): 297-309). Cells were transfected or exposed to transfection reagent alone, and levels of PPM1A expression were evaluated by qPCR 72 hours later. All experiments were performed in triplicate (FIG. 1). As shown in FIG. 1, all candidate PPM1A AONs showed efficacy in knocking down levels of PPM1A mRNA transcript expression, especially at the higher concentrations tested. These results demonstrate that QPA-905, QPA-972, QPA-1034, QPA-1045, and QPA-1371 were each able to knock down levels of PPM1A mRNA relative to control levels in an ALS patient cell line 72 hours after transfection. Results of the knockdown of PPM1A mRNA transcript expression is shown in Table 7.

TABLE 7
Knockdown of PPM1A transcript relative to control (lipofectamine
3000 alone). Mean +/− standard deviation

| | Control | 5 nM | 20 nM | 50 nM | 200 nM | 500 nM |
|---|---|---|---|---|---|---|
| Lipofectamine | 1.00 ± 0.05 | | | | | |
| 3000 Alone | | | | | | |
| QPA-905 | | 0.85 ± 0.04 | 0.86 ± 0.11 | 0.85 ± 0.07 | 0.83 ± 0.06 | 0.64 ± 0.04 |
| QPA-972 | | 4.58 ± 4.30 | 0.74 ± 0.07 | 0.84 ± 0.05 | 0.79 ± 0.28 | 0.44 ± 0.06 |
| QPA-1034 | | 0.81 ± 0.08 | 0.91 ± 0.23 | 0.69 ± 0.04 | 0.69 ± 0.06 | 6.4 ± 3.5 |
| QPA-1045 | | 1.06 ± 0.12 | 0.68 ± 0.03 | 0.84 ± 0.09 | 0.65 ± 0.05 | 0.34 ± 0.12 |
| QPA-1371 | | 0.88 ± 0.07 | 0.82 ± 0.07 | 0.76 ± 0.09 | 0.68 ± 0.07 | 0.57 ± 0.15 |

[0563] Knockdown efficacy of PPM1A AON candidates was also evaluated in the human neuroblastoma cell line SY5Y. SY5Y cells were plated in 96-well plates at a concentration of 5,000 cells/well and grown in media containing: Minimum essential medium eagle (Cat. No. M2279, Sigma, St. Louis, Mo., USA), nutrient mixture F-12 Ham (Cat. No. N4888, Sigma, St. Louis, Mo., USA), 100% Fetal Bovine Serum (Cat. No. 16140071, Life technologies, Carlsbad, Calif., USA), Glutamax 100× (Cat. No. 35050-061, Gibco), NEAA (Cat. No. 11140-050, Gibco), and penicillin-streptomycin (Cat. No. 30-001-C1, Corning). Cells were left untreated, treated with Lipofectamine 3000 alone, or transfected with PPM1A AON at various concentrations (5 nM, 20 nM, 50 nM, 200 nM, or 500 nM) using Lipofectamine 3000. Cells were separately transfected with 50 nM control siRNA (siControl, ON-TARGETplus Non-targeting Pool human, Dharmacon D-001810-10) or PPM1A siRNA (siPPM1A, ON-TARGETplus PPM1A, Dharmacon L-009574-00-0005) to provide an additional negative and positive control, respectively. 48 hours after transfection, RNA was isolated, cDNA generated and multiplexed RT-qPCR assay performed with tagman probes for PPM1A (Hs06637123_g1, Thermofisher 4351370) and reference GAPDH (Hs03929097_g1, Thermofisher 4448490) quantification.

[0564] PPM1A signal (Ct) was normalized to GAPDH (deltaCt). To visualize the quantitative changes (e.g., % decrease PPM1A transcripts), the normalized PPM1A signal was further normalized to the vehicle (treated with transfection agent alone, deltadeltaCt). Relative quantity of transcript level was calculated using the equation RQ=2^{-deltadeltaCt} and is used to describe the treatment condition comparison to normal, healthy levels (1.0).

[0565] Transfection of SY5Y cells with the PPM1A AON QPA-1371 resulted in a dose-dependent decrease in PPM1A expression that changed inversely with increasing amounts of transfected PPM1A AON (FIG. 2A, Table 8).

TABLE 8
Knockdown of PPM1A expression in response to QPA-1371. Mean +/− standard deviation

| | Control | 5 nM | 20 nM | 50 nM | 200 nM | 500 nM |
|---|---|---|---|---|---|---|
| Untreated | 1.00 ± 0.08 | | | | | |
| siControl | 1.16 ± 0.05 | | | | | |
| (50 nM) | | | | | | |
| siPPM1A (50 | 0.32 ± 0.02 | | | | | |
| nM) | | | | | | |
| Lipofectamine | 1.00 ± 0.09 | | | | | |
| 3000 alone | | | | | | |
| QPA-1371 | | 1.12 ± 0.12 | 0.99 ± 0.09 | 0.89 ± 0.11 | 0.79 ± 0.14 | 0.56 ± 0.02 |

[0566] Similarly, in a second experiment, transfection of SY5Y cells (using Endo-Porter delivery reagent as the transfection agent, Gene Tools, Inc., Oregon, USA) with the PPM1A AON QPA-905, QPA-1371, QPA-972, QPA-1034, QPA-1045, or QPA-895 resulted in a dose-dependent decrease in PPM1A expression that changed inversely with increasing amounts of transfected PPM1A AON (FIG. 2B, Table 9). Asterisk indicates p<0.05 vs endoporter alone in one-way ANOVA. Double asterisk indicates p<0.05 vs. siControl in a t-test. These results demonstrate that PPM1A AONs were able to inhibit PPM1A transcript expression in multiple cell lines.

TABLE 9
Knockdown of PPM1A expression in response to various
PPM1A AONs. Mean ±/− standard deviation

| | Control | 5 nM | 20 nM | 50 nM | 200 nM | 500 nM |
|---|---|---|---|---|---|---|
| siControl | 1.16 ± 0.05 | | | | | |
| (50nM) | | | | | | |
| siPPMIA | 0.32 ± 0.02 | | | | | |
| (50 nM) | | | | | | |
| Endoporter | 1.00 ± 0.09 | | | | | |
| QPA-905 | | | 0.97 ± 0.02 | 0.82 ± 0.05 | 0.49 ± 0.02 | 0.37 ± 0.03 |
| QPA-972 | | 0.97 ± 0.04 | 0.97 ± 0.07 | 0.83 ± 0.07 | 0.61 ± 0.08 | 0.35 ± 0.2 |
| QPA-1034 | | 1.06 ± 0.02 | 1.04 ± 0.20 | 0.79 ± 0.01 | 0.61 ± 0.05 | 0.42 ± 0.02 |
| QPA-1045 | | 1.22 ± 0.37 | 0.91 ± 0.04 | 0.92 ± 0.01 | 0.61 ± 0.4 | 0.44 ± 0.03 |
| QPA-1371 | | 0.99 ± 0.14 | 1.12 ± 0.09 | 0.86 ± 0.04 | 0.64 ± 0.07 | 0.37 ± 0.03 |
| QPA-895 | | 1.03 ± 0.02 | 1.11 ± 0.02 | 0.84 ± 0.09 | 0.59 ± 0.06 | 0.51 ± 0.03 |

[0567] To further evaluate the ability of PPM1A AON candidates to inhibit PPM1A expression, Western blotting experiments were performed. Specifically, 2 PPM1A AON candidates, QPA-1045 and QPA-1371, were selected to evaluate the effect of PPM1A AON transfection on PPM1A protein levels and the ratio of active to total TBK1. Lymphoblastoid cells from a healthy individual (“healthy cells”) or an ALS patient harboring a TBK1 mutation (“patient cells”) were transfected with RNAiMax transfection reagent (Thermo Fisher Scientific, Waltham, Mass., USA) alone or PPM1A AON at 5 μM using RNAiMax transfection reagent. 24 hours after transfection, cell media was changed to remove transfection reagent. Cells were then incubated for a further 48 hours, after which protein was extracted from cells for analysis. Protein extracts were probed by Western blot analysis using antibodies able to detect GAPDH (Cat. No. ab181602; Abcam, Cambridge, Mass., USA), total TBK1 (Cat. No. ab40676; Abcam, Cambridge, Mass., USA), phosphorylated TBK1 (Cat. No. 5483s; Cell Signaling Technologies, Danvers, Mass., USA), and PPM1A (Cat. No. ab14824; Abcam, Cambridge, Mass., USA). Secondary antibodies used included anti-rabbit IgG, HRP-linked (Cat. No. 7074; Cell Signaling Technologies, Danvers, Mass., USA) and anti-mouse IgG, HRP-linked (Cat. No. 7076; Cell Signaling Technologies, Danvers, Mass., USA). All experiments were performed in triplicate.

[0568] The ratio of phosphorylated TBK1 to total TBK1 was evaluated, using GAPDH as a control to normalize levels of phosphorylated TBK1 and total TBK1. Compared to lymphoblastoid cells not harboring the BP6074 cell line TBK1 protein-truncating mutation (“healthy cells”), BP6074 cells (“patient cells”) showed a significantly lower ratio of phosphorylated TBK1 to total TBK1 (FIG. 3A, healthy cells v patient cells, p<0.05). Furthermore, transfection of BP6074 cells with PPM1A AONs QPA-1045 and QPA-1371 resulted in a significant increase in the ratio of phosphorylated TBK1 to total TBK1, over that of even healthy cells (FIG. 3A, healthy cells v patient cells+QPA-1045, healthy cells v patient cells+QPA-1371, p<0.01; an approximately 8.5-fold increase over untransfected patient cells). Results are shown below in Table 10.

TABLE 10
Effects of PPM1A AONs on TBK1 levels. Mean
+/− standard deviation

| | PTBK1/TBK1 | |
|---|---|---|
| | % healthy cells | PPM1A/GAPDH |
| patient cells | 25.98 ± 2.94 | 0.99 ± 0.07 |
| patient cells + QPA-1045 | 173.6 ± 46.18 | 0.88 ± 0.08 |
| patient cells + QPA-1371 | 223.4 ± 22.99 | 0.72 ± 0.02 |
| healthy cells | 100 ± 8.59 | |

[0569] Additionally, PPM1A levels were evaluated in BP6074 cells exposed to transfection reagent alone or transfected with PPM1A AONs QPA-1045 and QPA-1371, using the same transfection protocol described above. PPM1A levels were normalized to GAPDH protein levels. Compared to BP6074 cells exposed to transfection reagent alone, BP6074 cells transfected with PPM1A AON QPA-1045 or QPA-1371 showed a decrease in PPM1A protein levels of about 10-25%. Transfection with QPA-1371 showed a statistically significant decrease in PPM1A levels (FIG. 3B, patient cells v patient cells+QPA-1371, p<0.01).

[0570] These results demonstrate that PPM1A AONs were able to decrease levels of PPM1A in an ALS patient cell line. These results also demonstrate that transfection of PPM1A AONs in an ALS patient cell line significantly increased the ratio of active (phosphorylated) TBK1 to total TBK1 in the patient cell line, even surpassing the ratio of active (phosphorylated) TBK1 to total TBK1 found in healthy cells. Thus, these results demonstrate that PPM1A AONs identified herein were capable of inhibiting PPM1A expression and increasing the ratio of active TBK1 in ALS patient cells.

[0571] RNA-knockdown potency was evaluated in SY5Y cells by several exemplary PPM1A AONs transfected with endoporter and tested for knockdown at 48 hours. FIG. 4A-FIG. 4Y are line graphs of RNA-knockdown potency of various candidate antisense oligonucleotides quantifying the decrease in PPM1A RNA with increasing AON concentration. Non-linear regression four parameter curves were fit and plotted using Graphpad Prism software (San Diego, Calif.), with the bottom of the curve fixed at 0. FIG. 4A represents RNA-knockdown potency of SEQ ID NO: 2898 (QPA-962); FIG. 4B represents RNA-knockdown potency of SEQ ID NO: 2899 (QPA-967); FIG. 4C represents RNA-knockdown potency of SEQ ID NO:2900 (QPA-972); FIG. 4D represents RNA-knockdown potency of SEQ ID NO: 2901 (QPA-977); FIG. 4E represents RNA-knockdown potency of SEQ ID NO: 2902 (QPA-987); FIG. 4F represents RNA-knockdown potency of SEQ ID NO: 2903 (QPA-1025); FIG. 4G represents RNA-knockdown potency of SEQ ID NO: 2904 (QPA-1030); FIG. 4H represents RNA-knockdown potency of SEQ ID NO: 2905 (QPA-1034); FIG. 4I represents RNA-knockdown potency of SEQ ID NO: 2906 (QPA-1040); FIG. 4J represents RNA-knockdown potency of SEQ ID NO: 2907 (QPA-1045); FIG. 4K represents RNA-knockdown potency of SEQ ID NO: 2909 (QPA-1361); FIG. 4L represents RNA-knockdown potency of SEQ ID NO: 2910 (QPA-1366); FIG. 4M represents RNA-knockdown potency of SEQ ID NO: 2911 (QPA-1371); FIG. 4N represents RNA-knockdown potency of SEQ ID NO: 2912 (QPA-1378); FIG. 4O represents RNA-knockdown potency of SEQ ID NO: 2913 (QPA-1386); FIG. 4P represents RNA-knockdown potency of SEQ ID NO: 2868 (QPA-542); FIG. 4Q represents RNA-knockdown potency of SEQ ID NO: 2869 (QPA-555); FIG. 4R represents RNA-knockdown potency of SEQ ID NO: 2883 (QPA-646); FIG. 4S represents RNA-knockdown potency of SEQ ID NO: 2870 (QPA-559); FIG. 4T represents RNA-knockdown potency of SEQ ID NO: 2908 (QPA-1098); FIG. 4U represents RNA-knockdown potency of SEQ ID NO: 2893 (QPA-895); FIG. 4V represents RNA-knockdown potency of SEQ ID NO: 2894 (QPA-900); FIG. 4W represents RNA-knockdown potency of SEQ ID NO: 2895 (QPA-905); FIG. 4X represents RNA-knockdown potency of SEQ ID NO: 2896 (QPA-910); and FIG. 4Y represents RNA-knockdown potency of SEQ ID NO: 2897 (QPA-915). IC50 calculated from the fitted non-linear regression curves are listed in Table 11.

TABLE 11
IC50 values for PPM1A AONs shown in FIGS. 4A-4Y.

| AON | IC50 (nM) |
|---|---|
| QPA-915 | 387.1 |
| QPA-1040 | 568.5 |
| QPA-977 | 291.9 |
| QPA-555 | 345.2 |
| QPA-1025 | 370.3 |
| QPA-1030 | 405.8 |
| QPA-967 | 419 |
| QPA-910 | 169.7 |
| QPA-1098 | 610.3 |
| QPA-962 | 362.5 |
| QPA-1386 | 667.5 |
| QPA-900 | 395.1 |
| QPA-1366 | 615.4 |
| QPA-1378 | 460.5 |
| QPA-987 | 280 |
| QPA-646 | 120.8 |
| QPA-542 | 411.4 |
| QPA-559 | 338.5 |
| QPA-1361 | 662.1 |
| QPA-905 | 207.9 |
| QPA-972 | 281.1 |
| QPA-1034 | 272 |
| QPA-1045 | 275.8 |
| QPA-1371 | 295.1 |
| QPA-895 | 349.8 |

[0572] PPM1A AON were also tested for potency to reduce PPM1A transcripts in human motor neurons. iCELL MN (Cellular Dynamics Internation Fujifilm C1050) were seeded onto 96 well plate (0.32 cm²/well) at a density of 10,000 cells/well. Cell were maintained following CDI guide instructions with a few modifications. Cells were thawed and plated in complete iCELL neuron media (CDI R1051) supplemented with 10 uM of Y-27632 dihydrochloride (Tocris 1254) overnight. The cells received a full media exchange the day after. Three days post plating the cells received a media exchange composed of 50% iCELL MN neuron media and 50% complete neuronal maturation media (Neurobasal-Thermofisher 21103049, lx Glutamax-Thermofisher 35050061, lx NEAA-Thermofisher 11140050, lx B-27 plus supplement-Thermofisher A3582801, 1×N2 supplement-Thermofisher 17502048, 0.2 ug/mL ascorbic acid-Sigma A4403 supplemented with growth factors BDNF, CNTF and GDNF (10 /mL BDNF-R&D Systems 248-BDB, 10 ng/mL CNTF R&D 257-N and 10 ng/mL GDNF-R&D Systems 212-GD). The cells were transfected 5 days post-plating in complete neuronal maturation media. The transfection of AONs were done using 6 uM Endoporter (Gene Tool Endo-Porter-PEG-1 mL). The transfection for control conditions used Lipofectamine RNAiMAX (Thermofisher 13778150). Negative control (siCtrol) consisted of 50 nM of ON-TARGETplus Non-targeting Pool human (Dharmacon D-001810-10) and positive control (siPPM1A) consisted of 50 nM ON-TARGETplus PPM1A (Dharmacon L-009574-00-0005). 48 hours post transfection the cells with siRNA were washout out to remove the RNAimax. 72 hours post-transfection, RNA was isolated from all treatment conditions, cDNA generated and multiplexed RT-qPCR assay performed with taqman probes for PPM1A (Hs06637123_g1, Thermofisher 4351370) and reference GAPDH (Hs03929097_g1, Thermofisher 4448490). RT-qPCR was performed using the TaqMan Fast Advanced Cells-to-CT Kit (Thermofisher A35378) and TaqMan Fast Advanced Master Mix (Thermofisher 4444557) following manufacturer's protocol and run on the Applied Biosystems QuantStudio 6 pro/7pro real time PCR system. One cycle of reverse transcription was performed at a temperature of 50° C. for 5 min. One cycle of RT inactivation/initial denaturation was performed at a temperature of 95° C. for 20 seconds. Forty cycles of amplification were performed at a temperature of 95° C. for 1 second followed by 60° C. for 20 seconds. Relative quantity was calculated as described for SY5Y.

[0573] Knockdown potency of example PPM1A AON are represented in FIGS. 5A-5T and FIGS. 6A-6K, which are line graphs of RNA-knockdown potency of various candidate antisense oligonucleotides quantifying the decrease in PPM1A RNA with increasing AON concentration. Non-linear regression four parameter curves were fit and plotted using Graphpad Prism software (San Diego, Calif.), with the bottom of the curve fixed at 0. FIG. 5A represents RNA-knockdown potency of SEQ ID NO: 2883 (QPA-646); FIG. 5B represents RNA-knockdown potency of SEQ ID NO: 2893 (QPA-895); FIG. 5C represents RNA-knockdown potency of SEQ ID NO: 2895 (QPA-905); FIG. 5D represents RNA-knockdown potency of SEQ ID NO: 2911 (QPA-1371); FIG. 5E represents RNA-knockdown potency of SEQ ID NO: 2896 (QPA-910); FIG. 5F represents RNA-knockdown potency of SEQ ID NO: 2897 (QPA-915); FIG. 5G represents RNA-knockdown potency of SEQ ID NO: 2900 (QPA-972); FIG. 5H represents RNA-knockdown potency of SEQ ID NO: 2905 (QPA-1034); FIG. 5I represents RNA-knockdown potency of SEQ ID NO: 2906 (QPA-1040); FIG. 5J represents RNA-knockdown potency of SEQ ID NO: 2907 (QPA-1045); FIG. 5K represents RNA-knockdown potency of SEQ ID NO: 2871 (QPA-599); FIG. 5L represents RNA-knockdown potency of SEQ ID NO: 2876 (QPA-606); FIG. 5M represents RNA-knockdown potency of SEQ ID NO: 2880 (QPA-625); FIG. 5N represents RNA-knockdown potency of SEQ ID NO: 2881 (QPA-642); FIG. 5O represents RNA-knockdown potency of SEQ ID NO: 2882 (QPA-644); FIG. 5P represents RNA-knockdown potency of SEQ ID NO: 2884 (QPA-648); FIG. 5Q represents RNA-knockdown potency of SEQ ID NO: 2885 (QPA-650); FIG. 5R represents RNA-knockdown potency of SEQ ID NO: 2886 (QPA-652); FIG. 5S represents RNA-knockdown potency of SEQ ID NO: 2887 (QPA-655); FIG. 5T represents RNA-knockdown potency of SEQ ID NO: 2888 (QPA-656); FIG. 6A represents RNA-knockdown potency of SEQ ID NO: 2872 (QPA-602); FIG. 6B represents RNA-knockdown potency of SEQ ID NO: 2873 (QPA-603); FIG. 6C represents RNA-knockdown potency of SEQ ID NO: 2874 (QPA-604); FIG. 6D represents RNA-knockdown potency of SEQ ID NO: 2875 (QPA-605); FIG. 6E represents RNA-knockdown potency of SEQ ID NO: 2877 (QPA-607); FIG. 6F represents RNA-knockdown potency of SEQ ID NO: 2878 (QPA-608); FIG. 6G represents RNA-knockdown potency of SEQ ID NO: 2879 (QPA-609); FIG. 6H represents RNA-knockdown potency of SEQ ID NO: 2889 (QPA-708); FIG. 6I represents RNA-knockdown potency of SEQ ID NO: 2890 (QPA-709); FIG. 6J represents RNA-knockdown potency of SEQ ID NO: 2891 (QPA-794); and FIG. 6K represents RNA-knockdown potency of SEQ ID NO: 2892 (QPA-795). IC50 calculated from the fitted non-linear regression curves are listed in Table 12.

TABLE 12
IC50 values for PPM1A AONs shown
in FIGS. 5A-5T and FIGS. 6A-6K.

| AON | IC50 (nM) |
|---|---|
| QPA-646 | 23.99 |
| QPA-895 | 436.9 |
| QPA-905 | 167.6 |
| QPA-1371 | 220.4 |
| QPA-910 | 105.5 |
| QPA-915 | 50.11 |
| QPA-972 | 32.17 |
| QPA-1034 | 136.9 |
| QPA-1040 | 177.1 |
| QPA-1045 | 64.98 |
| QPA-599 | 164 |
| QPA-606 | 65.45 |
| QPA-625 | 393.6 |
| QPA-642 | 53.55 |
| QPA-644 | 65.81 |
| QPA-648 | 77.34 |
| QPA-650 | 80.25 |
| QPA-652 | 89.47 |
| QPA-655 | 102.9 |
| QPA-656 | 101 |
| QPA-602 | 136.6 |
| QPA-603 | 99.34 |
| QPA-604 | 39.32 |
| QPA-605 | 93.72 |
| QPA-607 | 67.92 |
| QPA-608 | 157.6 |
| QPA-609 | 135.1 |
| QPA-708 | 167.5 |
| QPA-709 | 212.7 |
| QPA-794 | 1116 |
| QPA-795 | 164.6 |

[0574] To establish that AON decrease PPM1A expression in ALS motor neurons, 5 PPM1A AONs were tested at 4 dose points in human motor neurons derived from 2 ALS iPSC lines. One line carries a mutation in the TBK1 gene c.992+1 G>A and a second line carries a hexanucleotide repeat in C9orf72. The protocol used to generate spinal motor neurons is a modified version of the published protocol in Du et al. Generation and expansion of highly pure motor neuron progenitors from human pluripotent stem cells, Nat. Commun 6, 6626 (2015). iPSC were dissociated into single cells and seeded onto Matrigel (Corning cat #354277, dilution done following vendor specifications for lot #9280004 and 9273009) coated plates. 24 hour later, neural induction medium was added (1:1 DMEM/F12-Thermofisher 11330057 and Neurobasal-Thermofisher 21103049, lx Glutamax-Thermofisher 35050061, lx NEAA-Thermofisher 11140050, lx penicillin-streptomycin-Thermofisher 15140122, 0.1 mM beta-mercaptoethanol-Thermofisher 21985023, lx B-27 supplement-Thermofisher A35828-01, 1×N2 supplement-Thermofisher 17502048, 0.2 ug/mL ascorbic acid-SIGMA A4403) and supplemented with the GSK3B inhibitor CHIR99021 (3 uM from day 1 to day 6 and then 1 uM from day 7 to 12, R&D systems 4423) in addition to the dual SMAD inhibitors SB431542 (10 uM, from day 1 to 12, R&D Systems1614) and LDN193189 (100 nM from day 1 to 12, REPROCELL 04007402), which drives the iPSC's towards neuroepithelial progenitors (NEPs). These NEPs were differentiated towards motor neuron progenitors by adding retinoic acid (1 uM from day 7 to 21, Sigma R2625) and smoothened agonist SAG (1 uM from day 7 to 21, Millipore 566660). These small molecules drive the rostro-caudal axis and ventral identities, respectively. The addition of the gamma secretase inhibitor DAPT (10 uM from day 16 to 21, R&D Systems 2634) during the last 6 days of differentiation helps with the specification of post-mitotic motor neurons increasing the expression of ISL1 positive cells. The spinal motor neurons in culture were maintained in neuronal maturation medium (Neurobasal-Thermofisher 21103049, lx Glutamax-Thermofisher 35050061, lx NEAA-Thermofisher 11140050, lx B-27 plus supplement-Thermofisher A3582801, 1×N2 supplement-Thermofisher 17502048, 0.2 ug/mL ascorbic acid-SIGMA A4403) that contains the growth factors BDNF, CNTF and GDNF (10 ng/mL BDNF-R&D Systems 248-BDB, 10 ng/mL CNTF R&D 257-N and 10 ng/mL GDNF-R&D Systems 212-GD).

[0575] Patient iPSC-derived motor neurons were seeded onto 96 well plate (0.32 cm²/well) at a density of 10,000 cells/well. Motor neurons were maintained in neuronal maturation medium, PPM1A knockdown was established by transfecting patient motor neurons with example AON at 4 dose points (5, 20, 50, 200 nM) together with 6 uM endoporter delivery. Cells were treated with 6 uM endoporter alone for transfection control. siControl and siPPM1A were transfected in RNAiMax as negative and positive controls. Treatment conditions were performed in triplicate wells. siRNA were washed out at 48 hours post-transfection. 72 hours post-transfection, all treatment conditions were quantified for PPM1A RNA levels by qRT-PCR assay as described above. Relative quantity was calculated for each AON compared to endoporter alone (RQ=1.0).

[0576] FIGS. 7A and 7B show reduction of PPM1A expression in two ALS iPSC lines (TBK1 and C9orf72) following treatment using PPM1A AONs (QPA-895, QPA-905, QPA-915, QPA-1045, QPA-1371, AND QPA-646). In TBK1 patient motor neurons, PPM1A AON decreased PPM1A RNA in a dose-dependent manner (FIG. 7A, Table 13). 200 nM QPA-895 (SEQ ID NO: 2893) reduced PPM1A RNA to 0.12, 200 nM QPA-905 (SEQ ID NO: 2895) reduced PPM1A RNA to 0.038, 200 nM QPA-915 (SEQ ID NO: 2897) reduced PPM1A RNA to 0.048, 200 nM QPA-1045 (SEQ ID NO: 2907) reduced PPM1A RNA to 0.045, 200 nM QPA-1371 (SEQ ID NO: 2911) reduced PPM1A RNA to 0.057, and 200 nM QPA-646 (SEQ ID NO: 2883) reduced PPM1A RNA to 0.022.

TABLE 13
Relative PPM1A quantities in response to PPM1A AONs in TBK1 patent
motor neurons. Mean +/− Standard deviation

| | Control | 5 nM | 20 nM | 50 nM | 200 nM |
|---|---|---|---|---|---|
| siControl | 1.00 ± 0.10 | | | | |
| siPPM1a | 0.20 ± 0.07 | | | | |
| endoporter | 1.01 ± 0.14 | | | | |
| QPA-895 | | 0.71 ± 0.04 | 0.42 ± 0.07 | 0.28 ± 0.04 | 0.12 ± 0.03 |
| QPA-905 | | 0.16 ± 0.034 | 0.06 ± 0.02 | 0.04 ± 0.01 | 0.04 ± 0.01 |
| QPA-915 | | 0.54 ± 0.10 | 0.17 ± 0.01 | 0.11 ± 0.01 | 0.05 ± 0.01 |
| QPA-1045 | | 0.49 ± 0.12 | 0.21 ± 0.03 | 0.10 ± 0.01 | 0.04 ± 0.01 |
| QPA-1371 | | 0.50 ± 0.05 | 0.15 ± 0.01 | 0.04 ± 0.01 | 0.06 ± 0.02 |
| QPA-646 | | 0.12 ± 0.03 | 0.05 ± 0.01 | 0.11 ± 0.05 | 0.02 ± 0.01 |

[0577] In C9orf72 patient motor neurons, PPM1A AON decreased PPM1A RNA in a dose-dependent manner (FIG. 7B, Table 14). 200 nM QPA-895 (SEQ ID NO: 2893) reduced PPM1A RNA to 0.18, 200 nM QPA-905 (SEQ ID NO: 2895) reduced PPM1A RNA to 0.12, 200 nM QPA-915 (SEQ ID NO: 2897) reduced PPM1A RNA to 0.15, 200 nM QPA-1045 (SEQ ID NO: 2907) reduced PPM1A RNA to 0.11, 200 nM QPA-1371 (SEQ ID NO: 2911) reduced PPM1A RNA to 0.12, and 200 nM QPA-646 (SEQ ID NO: 2883) reduced PPM1A RNA to 0.063. These results show example PPM1A AON function to reduce PPM1A transcripts in ALS patient motor neurons.

TABLE 14
Relative PPM1A quantities in response to PPM1A AONs in C9orf72
patent motor neurons. Mean +/− Standard deviation

| | Control | 5 nM | 20 nM | 50 nM | 200 nM |
|---|---|---|---|---|---|
| siControl | 1.00 ± 0.06 | | | | |
| siPPM1a | 0.11 ± 0.03 | | | | |
| endoporter | 1.01 ± .014 | | | | |
| QPA-895 | | 0.57 ± 0.06 | 0.51 ± 0.02 | 0.40 ± 0.02 | 0.18 ± 0.02 |
| QPA-905 | | 0.19 ± 0.03 | 0.22 ± 0.02 | 0.20 ± 0.03 | 0.12 ± 0.01 |
| QPA-915 | | 0.51 ± 0.05 | 0.38 ± 0.02 | 0.28 ± 0.01 | 0.15 ± 0.03 |
| QPA-1045 | | 0.52 ± 0.02 | 0.37 ± 0.04 | 0.25 ± 0.02 | 0.11 ± 0.01 |
| QPA-1371 | | 0.42 ± 0.06 | 0.33 ± 0.06 | 0.22 ± 0.02 | 0.12 ± 0.003 |
| QPA-646 | | 0.25 ± 0.04 | 0.20 ± 0.10 | 0.12 ± 0.02 | 0.06 ± 0.003 |

[0578] Three PPM1A AON were synthesized with cholesterol conjugated to the 3′ end and tested for function in the PPM1A qRT-PCR assay using iCell human motor neurons in triplicate wells. The three PPM1A AON with a cholesterol conjugate group are shown above in Table 6. 72 hours post-transfection, PPM1A and GAPDH RNA levels were quantified by qRT-PCR. FIG. 8 shows the decreased PPM1A relative quantity in human motor neurons in response to treatment using PPM1A AONs with a cholesterol conjugate group (QPA-606-C, QPA-642-C, QPA-644-C). Results are further shown in Table 15. As compared to endoporter alone (RQ=1.0), 500 nM QPA-606-C(SEQ ID NO: 2876) reduced PPM1A RNA to 0.16, 500 nM QPA-642-C(SEQ ID NO: 2881) reduced PPM1A RNA to 0.15, and 500 nM QPA-644-C(SEQ ID NO: 2882) reduced PPM1A RNA to 0.12. Therefore, cholesterol conjugates of PPM1A AON sequences significantly decrease PPM1A RNA.

TABLE 15
Relative PPM1A quantities in response to PPM1A AONs with cholesterol
conjugate group. Mean +/− Standard deviation

| | PPM1A Relative Quantity |
|---|---|
| endoporter | 1.00 ± 0.14 |
| 500 nM QPA-606-C | 0.16 ± 0.06 |
| 500 nM QPA-642-C | 0.15 ± 0.03 |
| 500 nM QPA-644-C | 0.12 ± 0.05 |

[0579] To further test PPM1A AON for ability to inhibit PPM1A expression, PPM1A and downstream target protein levels were quantified following AON transfection of human motor neurons (FIGS. 9-12). Protein levels were quantified by western blot and using the method as follows. Motor neurons derived from wildtype or diseased iPSC-derived motor neurons were seeded onto 6 well plates (9.6 cm²) or 12 well plates (3.5 cm²) at a density of 750,000 cells/well and 400,000 cells/well respectively. Motor neurons were maintained with neuronal maturation media (Neurobasal-Thermofisher 21103049, lx Glutamax-Thermofisher 35050061, lx NEAA-Thermofisher 11140050, lx B-27 plus supplement-Thermofisher A3582801, 1×N2 supplement-Thermofisher 17502048, 0.2 ug/mL ascorbic acid-Sigma A4403 supplemented with growth factors BDNF, CNTF and GDNF (10 ng/mL BDNF-R&D Systems 248-BDB, 10 ng/mL CNTF R&D 257-N and 10 ng/mL GDNF-R&D Systems 212-GD).

[0580] Motor neurons were transfected 5 days post-plating in complete neuronal maturation media. The transfection of AONs were done using Endoporter at a final concentration of 6 μM. Cells were incubated for 72 hours and then collected for western blotting. The cell lysis buffer 2% SDS (50 mM Tris pH7, 10% glycerol, 2% SDS) was supplemented with 1×Halt protease inhibitor cocktail (Thermofisher 78425) and 1× Halt phosphatase inhibitor cocktail (Thermofisher 78428). Samples collected using 2% SDS were left in the 95° C. heat block for 10 minutes right after collection followed by a short spin to gather any evaporation accumulated on the lids. Protein quantification was done using a Pierce BCA Protein Assay Kit (Thermofisher 23227) following manufacturer instructions. The plate reading was done using a SpectraMax i3× from Molecular Devices and the data collected using the SoftMax pro. Gels were run using 4-20% Criterion™ TGX Stain-Free™ Protein Gel (Biorad). After running the gels, the membranes were transferred using the Iblot2 transfer system. Membranes were blocked in either 5% BSA (for phosphorylated proteins) or 5% milk for 40 minutes. Membranes were incubated with primary antibodies overnight at 4° C. The following antibodies were used LC3B (Cell Signaling CST2775); PPM1A (Abcam ab14824); NAK/TBK1 (Abcam ab40676); Phospho-TBK1/NAK (Cell Signaling 5483); GAPDH (Proteintech 60004 and Abcam ab181602). The following secondary antibodies were used (Anti-rb Rabbit IgG, HRP linked (Cell Signaling 7074) and Anti-ms IgG, HRP linked (Cell Signaling 7076). Images were obtained using Li-Cor Fc imaging system and the software used for quantification was the Image Studio Lite.

[0581] First, PPM1A AON were examined for ability to decrease PPM1A protein levels in TBK1 mutation ALS patient iPSC-derived motor neurons. PPM1A AON were transfected at 500 nM with endoporter and control wells were treated with endoporter alone. Additionally, siControl (siCtrol) and siPPM1A were transfected with RNAiMax and washed out after 48 hours. 72 hours post-transfection, all treatment groups were collected for western blot analysis of PPM1A protein levels. PPM1A band intensity was quantified and normalized to GAPDH. Percent expression of PPM1A was calculated by dividing the PPM1A/GAPDH value by control and multiplying by 100 (SiPPM1A vs. siCtrol; PPM1A AON vs. endoporter).

[0582] FIG. 9 and Table 16 shows the reduction in PPM1A protein in response to treatment using PPM1A AONs (QPA-646 and QPA-915). 500 nM QPA-646 (SEQ ID NO: 2883) reduced PPM1A protein to 40% of normal and QPA-915 (SEQ ID NO: 2897) reduced PPM1A protein to 48% of normal. Thus, PPM1A AON decrease PPM1A transcripts leading to reduction of protein expression.

TABLE 16
Relative PPM1A quantities normalized to control
(endoporter) in response to PPM1A AONs.

| | % PPM1A relative to control |
|---|---|
| siCtrol | 100 |
| siPPMIA | 63.463 |
| endoporter | 100 |
| endo + CL | 69.4383 |
| QPA-646: 500 nM | 39.8165 |
| QPA-915: 500 nM | 48.4634 |

[0583] Next, PPM1A AON were examined for ability to decrease PPM1A protein levels in wildtype iPSC-derived motor neurons. The following PPM1A AON were evaluated: QPA-642 (SEQ ID NO: 2881), QPA-646 (SEQ ID NO: 2883), QPA-1371 (SEQ ID NO: 2911), QPA-905 (SEQ ID NO: 2895), and QPA-915 (SEQ ID NO: 2897). PPM1A AON were transfected at 50, 250, and 500 nM with endoporter and control wells were treated with endoporter alone. 72 hours post-transfection, all treatment groups were collected for western blot analysis of PPM1A protein levels. PPM1A band intensity was quantified and normalized to GAPDH. Percent expression of PPM1A was calculated by dividing the PPM1A/GAPDH value by control and multiplying by 100 (PPM1A AON vs. endoporter control).

[0584] FIG. 10 shows the decrease in PPM1A protein levels in wildtype iPSC-derived motor neurons in response to treatment using PPM1A AONs (QPA-642, QPA-646, QPA-1371, QPA-905, and QPA-915). All PPM1A AONs decreased PPM1A protein to levels between 40-94% of normal by 72 hours (Table 17). Thus, PPM1A AONs decrease PPM1A transcripts leading to reduction of protein expression.

TABLE 17
PPM1A AON decrease PPM1A protein levels at 72 hours

| AON | control | 50 nM | 250 nM | 500 nM |
|---|---|---|---|---|
| Endoporter alone | 100 | | | |
| QPA-642 | | 58.9% | 59.4% | 73.5% |
| QPA-646 | | 54.4% | 70.5% | 65.9% |
| QPA-1371 | | 69.0% | 93.8% | 80.0% |
| QPA-905 | | 43.4% | 47.3% | 39.8% |
| QPA-915 | | 60.3% | 62.0% | 57.5% |

[0585] PPM1A functions as a phosphatase and one of the targets it dephosphorylates is the protein TBK1. Therefore, we investigated whether reduction of PPM1A transcripts and protein has a downstream function impact to increase phosphorylation of TBK1. TBK1 is known to be phosphorylated at serine 172, and dephosphorylation controlled by PPM1A activity (Xiang et al, PPM1A silences cytosolic RNA sensing and antiviral defense through direct dephosphorylation of MAVS and TBK1, Science Advances, 2(7), Jul. 1, 2016). Wildtype iPSC-derived human motor neurons were endoporter transfected with 50 nM QPA-646 (SEQ ID NO: 2883), 50 nM QPA-905 (SEQ ID NO: 2895), or treated with endoporter alone (control) according to the methods described above for western blot assay. AON and endoporter was removed and neurons replaced with fresh media after 72 hours. On day 7 post-transfection, motor neurons were treated a second time with AON and endoporter or endoporter alone. On day 14, motor neurons were lysed and analyzed for PPM1A, phosphorylated TBK1 (pTBK1, serine172), TBK1, and GAPDH by western blot for protein levels. FIGS. 11A-11C and Table 17 show the qualitative and quantitative results of the Western blot analysis in human motor neurons treated using PPM1A AONs (QPA-646 and QPA-905). QPA-646 (SEQ ID NO: 2883) decreased PPM1A protein to 17% of control and QPA-905 (SEQ ID NO: 2895) decreased PPM1A protein to 14% of control. QPA-646 (SEQ ID NO: 2883) increased pTBK1 relative to TBK1 to 223% of control and QPA-905 (SEQ ID NO: 2895) increased pTBK1 relative to TBK1 to 555% of control. Both AON showed sustained knockdown of PPM1A at the protein level after 2 weeks of AON treatment leading to an increase in the downstream effector pTBK1.

TABLE 17
PPM1A AON decrease PPM1A protein levels and
increase PTBK1/TBK1 levels at 72 hours.

| | % Control PPM1A/GAPDH | % Control PTBK1/TBK1 |
|---|---|---|
| endoporter | 100 | 100 |
| QPA-646 | 17.2414 | 222.965 |
| QPA-905 | 13.7931 | 554.865 |

[0586] In order to determine whether PPM1A AON can affect additional downstream pathways, induction of autophagy through LC3B was examined. Wildtype iPSC-derived human motor neurons were endoporter transfected with 500 nM QPA-646 (SEQ ID NO: 2883) or treated with endoporter alone (control) according to the methods described above for western blot assay. 72 hours post-transfection, cells were lysed and processed for western blot detection of protein levels. FIGS. 12A-12D and Table 18 show the qualitative and quantitative results of the Western blot analysis in wildtype iPSC-derived human motor neurons treated using PPM1A AON (QPA-646). QPA-646 (SEQ ID NO: 2883) decreased PPM1A protein (0.50 endoporter vs. 0.37 QPA-646), increased pTBK1 relative to TBK1 (0.0011 endoporter vs. 0.0043 QPA-646) and increased LC3B II relative to LC3B 1 (0.23 endoporter vs. 0.88 QPA-646). The ratio of LC3B II to I increases with autophagy induction as more autophagosomes containing the lipidated LC3B (II) are formed. Therefore, PPM1A AON increases downstream pathway activity leading to increased pTBK1 and autophagy.

TABLE 18
PPM1A AON decrease PPM1A protein levels, increase PTBK1/TBK1
levels, and increase LC3B II/I at 72 hours.

| | PPM1A/GAPDH | pTBK1/TBK1 | LC3B II/I |
|---|---|---|---|
| endoporter | 0.50 | 0.001 | 0.23 |
| QPA-646: 500 nM | 0.37 | 0.004 | 0.88 |

[0587] Inhibition of the proteasome causes proteotoxic stress leading to cell death. As a model of protein stress and neurodegeneration, we examined whether PPM1A AON rescue cell survival after proteasome inhibition with MG132. SY5Y cells were plated at a density of 5,000 cells/well in a 384-well plate and cultured for 24 hours. SY5Y were then transfected with AON at 200 nM, QPA-905 (SEQ ID NO: 2895), QPA-1045 (SEQ ID NO: 2907), QPA-895 (SEQ ID NO: 2893) for 72 hours. Cells received a 24 hour washout with fresh media. 0.4 uM MG132 (Cat. No. 1748, Tocris) was added to wells treated with AON and also to control wells. Cell survival was measured 16 hours later by the CellTiter-Glo 2.0 cell viability assay (Promega, Madison, Wis.) according to manufacturer's instructions. Cell lysates were quantified for luminescence on the GloMax Luminometer (Promega, Madison, Wis.). All treatment conditions were performed in 7 replicate wells. Luminescence data was normalized so that untreated condition equals 100% response and MG132 treated equals 0% response. Percent rescue of cell survival was calculated for AON and MG132 combination treatment.

[0588] FIG. 13 and Table 19 show the percent rescue of cell survival in a proteotoxic stress neurodegeneration model in response to treatment using PPM1A AONs (QPA-905, QPA-1045, and QPA-895). QPA-905 (SEQ ID NO: 2895) rescued cell survival by 69%, QPA-1045 (SEQ ID NO: 2907) rescued cell survival by 56% and QPA-895 (SEQ ID NO: 2893) rescued cell survival by 58%. QPA-905 (SEQ ID NO: 2895), QPA-1045 (SEQ ID NO: 2907), and QPA-895 (SEQ ID NO: 2893) all significantly increase cell survival (***p<0.0001, one-way ANOVA with Tukey multiple comparisons test vs. MG132 alone). Therefore, AON which decrease PPM1A, lead to increased autophagy capacity that functions to protect cells from neurodegeneration.

TABLE 19
PPM1A AON treatment leads to rescue of cell survival in a proteotoxic
stress degeneration model. Mean +/− Standard deviation

| | % Rescue Cell Survival Relative to Control |
|---|---|
| No Tx | 100 ± 18.72 |
| MG132 | 0 ± 19.13 |
| QPA-905 | 68.7 ± 22.62 |
| QPA-1045 | 55.55 ± 19.46 |
| QPA-895 | 58.37 ± 18.42 |

### INCORPORATION BY REFERENCE

[0589] The entire disclosure of each of the patent documents and scientific articles cited herein is incorporated by reference for all purposes.

### EQUIVALENTS

[0590] The disclosure can be embodied in other specific forms with departing from the essential characteristics thereof. The foregoing embodiments therefore are to be considered illustrative rather than limiting on the disclosure described herein. The scope of the disclosure is indicated by the appended claims rather than by the foregoing description, and all changes that come within the meaning and range of equivalency of the claims are intended to be embraced therein.

The application's sequence listing, which the Patent Office published only in electronic form, follows.

SEQUENCE LISTING (2959 sequences)

SEQ ID NO: 1 - DNA, 60336 bp, Homo sapiens
ttatttttctgaatgccttcaaatgtgacaagtatgctctactgatccccattgtgtcagacccagcctgatctaacatttatattaccagcctggtcccagtcaaaggagctggagttttcagattctggtgctaacctgaattctacctaccacttctttacaaagaggcctctgccgtgtttgtaccagcggcaggatgacttgaagctctccatggacatgcggtgggggtggaggtgttgatggatattgtcttggcttttgccttatgtgggatttttaagaaatgtgcaggaaaaaaaaaacaggaaagtgtattaggagaaggcaggatagaagttttcctcacgtggagagagcaggagaatggaggaagtgactgctggaagcaaaactctaagaaaaaaccaattttacttggagcttaaaaaagattttgctgtgtaatgtgcattgtaactcttctcccatctccccaaggcatctttggtaaagatgtcattgttgggctttttgttttccatggcacaatgcactgaaagggcctcaaggggaaagcaagtcatctctggaaagcttagccagaatttgcaacagaaagagtgggaattttggaatcaggtcctaggcttgcaaaagagctctttttcacagccttagcttcctcctttgtaaaatggaaaaaaaaatagtttcttttttgcaaagttgttgtgagaattaaataacactcatgaggggcattgtatggagcttggcacattctaggccctctttttatattgaactaatatgatcttctctgtaattcccatgaattaattccagttctattttgcaaaacattgattctttaacctttttcatgtaatggtgctccagtttgtctagatccttcaagaagagaaaatgcatatcaacatctttgtatctagttgctctcaagcttaaaatgatgtcatttttcaattattgcttttattatacagtaaaaacatatttagaagagactcaagataaatattaaaagttaagctagttactgaacaaatttcttaaatatttacgaaaaataagatcaacacacatttgaccatggcagcttttctaaaggcaaaggatctaatttggtgattaactaaccatattgagcactcattaggtgtcagggatgtaccagttcttctactgtatttgggtgtttttaattatgaataaccaaatacaaaaatcaaagtagtttaaacaatgaggagcatttattatcactcttaaaaataaattcccaaggtgggcaattgcacggatggctcaatggctttacaatgtgaaagatccagccacttgctatcaattcttttctctacattgccttggttctttgcaagataaccttgaaattccaggctcacatatagaaataacaacatatggctgaggaaggcattttctctcctgtgattcttcttattagggaagaaaacctctctaccccctcaagacttctcaatttcctttatccagaattgggctacctcactatgtccccaggcagtgcttctcaattttttcacaccatgacacaaatacaaagataacgtttttgtgacacagaggggtacctgggtaatgttgcttgtggccagtcataccatcccagggcttcagcagctcagcctcacttgaatgtcccaagggcttaagggatccataccttatcacatctatgacccatctgagacataccagggtatgctggcacatagattggtatgctctgctctaagctacaagggagggtgagagagcatgcatccatatacatgctctagtgagagaaggatctgccaacgaggaggctctgccaagtagtaggaagtggtggggcaaccaaccgcatcagtcatcttttcaagggtgccttcatctattctaattttcacaacacattttaggaggaagtattctgtggaggataaaaccaaggcttataatttaaatgacttgcctgaggtcacagaaccagtgagtggttcaattgacacagcagatgcagatccaggtgtgtgctgggaaatgtttaacaaccacctttccaaatgtagttccaacatggctattggttaatattttcatttaagataaaaataaaacaacaaaaatgtatgttagagcttattagtcaatgatgtgacttcattgctaaattgaatgtttttatgctattcaccatgtaacagttatagacacgacatgtcttttacatttaatctgcataaaacattttctctgtcacttaagcctagaccaagcttgtccaaccctgggcctgtgggccgcatacagcccaggatggctttgaatgcagcccaacacaaattcgtaaactttcttaaaatgtgagattttgtgtgtgtgtgtgattttgtttcgttttgttttgtattagctcatcagctatcattagtgttagcgtattttatgtgtggcccaagactatttttcttctgccaatgtggccgagggaagcaaaagattggacaaccctggtctagcccacaaccagcaaagcaataagtgaagccctcatctgtggtgtccgctgatcaagctaccaaagaaaactcactaaatgtggtattgggaagagatgtacaattacatatagggaatttccaccatgcagacacaatgcatgtaaattgcctaaagaacaaagacaatattaaaatgtattaacataatttggaagtgatgtttttatcacatactacctttgtttaaaatttatttcattggaagtttatctaacttaatttttatttctatttttatatttatttattgattgatttttgagatggagtctcaccttgtcacccaggctggagtgcaatggcgcaatctcagctcactgcaacctctgcctcctgggttcaagcaattctcctgcctcagcctcccaagtagctaggattacaggctcccgacaccacacctggctaatttttgtatttttagtagagacggggtttcaccatgttggccaggctgatctcaaactcctgatctcaggtgatccacccacctcagcctcccaaagtgctgggaatataggcatgagacactgcacccagcctatatcatttaatttttaataatgagtatttaacaaacagcaggcaaaatttctgaaaatttaataatctgctgtcatgagccagtataggccagctctccacaccacggactggaactaagttcagcactctttccactcctgctgcctttactaccagcatgtaaaagcaatgatgctcagtatcgtacgggggacaaacctgggtacccgtcattaatttctgtgaccctgggtagttactaccagatgcttagttttctcttctataaaggaggagattaagagtccttgccctgtctacctgcaagggtttttgagaggattaaactggttagtctgtatgatagtgctttgtaaactgcagagtcaggttcagataaaaggctttatgatgatgacaatttcattactgttttcaaccaggccaccattgttaaggatgcagtgtgtcgctgctttcaaaagtatggtttagtttgagatcttctgtaatgcccaggatagacagtaaacacccagaagaattgttctgaagaagcccactcaaatctgtgctagtctttacttagcacaaataggtacctatattgggatgaaaactatttatttgaagcttataattcactcttttctagctgctgctggattgtctgacgggtctttcctggagttatggaatacttctcaatttcaatagttgaataaaggtgtttttttttctgtcatgcaggctagggtgcaggggcatgatctcggcccactgcaacctccacctcctgagttccagtgattctcctgcctgcgattctcctgcctcagcttcccaagtagctgggattacaggcgtgtgccaccaggtgtggctaattttgtattttcagtagagacggggtttccccatgttggccaggctggtcttgaactcctggcctcaagtgatccactcgctttggccttccaaagtgctgggattacaggtgtgagccactgcacccagactatttttaatttcaatttttaaaaaagttgctttgctttttgcaccagaccaactcaccaagttattttctatggattatacccgtgcacataatgtagtttcctgattataaattaaatatccctaatgtccacgttgaaacactctcgaaacttaaatgaccataaactatttgccttgagtttgctgaacttgtctttgggctgtaagaaactcttttctgccaagctcttttccacatcaggccctttgcccatgctgacccctctacctggaaagttctcccctgattatgaagctgactccttctcatcctttagatcaaatgctgccttcttagagaggtctgcactgaacacctgtttcaagtcgtctcccggatctgtttccttatttattttcttcacagcatggataacagtatgcaatttcctttctatctgctgacttatttgtctatgcctcttattattatgttggctctttgtgggcagggcttgcccattgatgtcattatctacctccagtgtcccacacagtgcttggtgcacaatagctatctcatgaacagatgaacttatctgacaagatccactctagtattgtaaggctgtggccatatatggctatcttgaggtgaaagcctaccctaaagactgtccaggacttggcctctggtgctcacagttgcccaggtttctctcaggtcgcaggatgagccacagtggtagcataagactgctggctgctcccctctgcccctccctaatggggctgcccagtgatgtcacacaggacaggattctctaatccttttgattctgtaacagtcctctaagcagctaagtttctcataatgtattatgatgtaggggagggaggaaggagggccagggtagggggcacaccctctccctgaatgaaattcatttaggggcactgtctgctcgcatgttctgttctgggagaaaatgggtagcagaagctacaatttgtactaagctaatgaaaagagagaaaagaagaatggggaagagaagggcaaagaaggcaaaaagagaagagaagaaaaagggaggagagagaaggagaaatgagaaaagaggaaaccaaatgaagaggatgtgtgagagaaaaaaatatgaaacaggtagtgagggaggaaggaattgttgaacctatgttctggttggctttctaactcttgagtagtgactggcttcagtggaaaaggatggtgaggggtattctcaaatactagcctcctgagggggtcatttacattactgcatatattttgagaggcccaggcaagtctgcctcaagggtgactctcctggagagtaatttgggagcaggaatgtaaacctttttttaagtcacaattgtggtggaaagggaaagagagtattgctgatcagattaagctttagactccacactacagcccctgtcctcaccccaagcctcccaattactaggctatcaacacacactaaattcaggactttaaagccaatcttgtagataatctttttctttgttaattgaaatataaacagatttccaaagcagagcaggatagttttataatatacctataaaaattactaaaatgtcatcatcatggcaatatattcccactaaaatcttactgtgaacatcccaaatatgtgtagaggcccggcaaagtcttacagttcagaagagaactttcaatcctcttttttcaatgttattttccccttctatctgtccccccttcttagcataaggtttaataaaaggggatatgatgatattaaacatatttaatcagacaatattgatatctttttaaaatattaatcttataacccatgagtttcctagttcataccaaaatgtccctgcaagctgtattcagaaataaatagtaggaaggtgctgctttatcggcagtctgtacaatgcgtagactccttaaaaatttctttctgttcatattttctatttctctccctcttcttctacaattgacccagattctccaagtgcagaacagagagaagaaaggtgtggaagcctaaaggaaggaagcagaaagataggcaggcatttcaagttttctatggtccactaccgtcactagtgacccagcttctgcttataaataagaaaatttgtcttttaagagcactctaaatggttgccatatgagcttttgtagttcagaatgttaatgagtccaccagcatgctactcatgctgttacttgcctggagtattaaggattccaagaaggtagcgtttcaaagatctctgatctaatttctttttttggggggtcggggagatatgtggagaattaggaaatgtatcctcagatgatactgagaccaaatgcatagtgaattttatttttattttgtatatgtggaaatgatccacgatcatcttctaaggaattctggccgggaacagtggctcacgactgtaatcccagcactttgggaggccgaggagggtggatcacgaggtcaggaaaccgagaccatcctggccaacacggtgaaaccctgtctgaactaaaaatacaaaaaaattagccaggcgtggtggcaggcgcctgtagtcccagctactcgggaggctgaggcaggagaatggcatgaacccgggaggcggagcttgcagtgagccgagattgtgccactgtactagcctggatgaaagagcgagactctgtctcaaaaaaaaaaaaaaaaaaaaaaaaaaaagtgaaggaaacagaaccttccccaaagtcatgttgagaaaattagagatggctttttacaactttaaaagcagcagctaaatatttgctgaatgccagaaagaataaataggttgcttttgatctaagagttggggcaacaaaatggtttaggagatagaaagtagtagggtgcaaattgctatagtgagctcctcaagtaaaatagagaggccttcaacataaatttaccttttttactggccagaactcaatttggccagtaaaagaacctgccttctacaatgaagtctttggtttgtgtgtgcatcagaacatcttttaaaaatacggacttttcttctaacttcttttcctgcgaatgtggtgtaggtcaaattcgtgaactggttaagccgctgacaagagagggaagggcaccccagccaatgggaacccgtgctggtgatgtactgctcctaggctgcgattcattggctgcctagggtttgtcattctatccccggcgtctgcaagcagcgtgggtcgggttttccagctagctaaactggattttggccgctggcacgtgcagtttctattaactttagctcatctctacctcttaatagaagcagctgttatgtttctgattattctcctgattttgaaaaatcctgttcccttaacctacctcattggaggtcgttggaggtcccctgggacagaaccacgtgattatctaacatgtgcaaataaatacaatgtggaatcccctgaactatagagggaaaacctgccagaaactcagagcatgtgccccgtgcgtgaatcagttgcactcgcacattggtgggcggtggtagcgtgcttgtgtctctgccctttgggtcgcgaggtgtgtggccgtggcacctgcttgggcttcctggggtcactgggagaggaaggctctggaggagtgggactctggggtaggggggtctggcagctgcctgggacccaccatgggttcgaagggcagcggccagaccgcgacggcgcccaagaagggtggacagcttcgggtctgtgctcggggctgcgtgtacaccatcttcgcagggagtggggtttgtatctgcaggcaggtagaagagccagggctccgggcgcggacgccgtaggggtagcttccgagtccctacttggccaagggccggcacggaggggctgtcgatctactgggcacctaatagccgcacattctgtccagtccctggcgccggaacgtgaaggcccgggtcctggctgctatccgggatccggacgctcccttcggcttcggcctggtgctccaggccgtaaggcaaaggcggcggcagcagcagcggcagagaaagaagctgggtaaggcagtgacgtcatctgtggcggcccctcccccgcccgccagccctcaccgcagttcctgcccaacgacatccgggtctctgtagctgcgcgccgcgccgcagctgtagcggcggcggagccagcggggcggggcgagcggaggggtgggggaggggcgacgcggtcgtgagcgcgcctgcgcggggccgcgctagaggcggcggcggcggcggtggcggcgctagggacgggagcgcgcgcgggagctagagagcagtggtctcggcgctcgtccggcccgcagcttcgggtcctcaggcggctgttgctccggaacgggtggttggggaggggggggtggggggactctagacagctgaggcgcgaaagcgatgagtcctcggctcttcctcctccttctccgggacccgctctctgcctccctctccaacgcccggatgatctgagccgcgagggcgccgacagccgggggcccggacgcagcccggctcctcccctcctccgccccttccccagcctgacctggcccgccgctgcagcggtgacccctcccccggctgccgccgtcgccgccgcggtgaccccctccccggctgccgccgccgccgcctcggccgaccagggacctgcccgcctgcggctgctccgggtaagtgcggcgctcgggccgacggcgggctggcgggcggtgcgggcctgcgcggcggcggcggcgggcaggcctggggcctgtaaacaagccgggcgtctgcccgggcgctcccgggaggagacgcgacaactccaccccctggccggcctcctcccccgagccgggcggcggacggcgaggggttaacgctcggcgagggcggtggcggggaggcgggggcggggtgttagttgcggtggcgcggggagggggcgcgaccctctggccgtccgcggccgagatgggtgtttgtggcggcgaagcaggcgacggccgcaggccggcctggccggagagcggcctgcagaacttttcccgagcggggagggggcgtccccgcgcccccacccgctcgggcgcgccgccccggctgtcctgggcttcagcccctgggagggaggcggggagacttcctttgaaccgggcttagcctcgaaaaacctaattctgtagaaattgcttaaggttttacagggggcagggctgagagactccttcagaactcaagtcagtgagtgatgcctctagttcattcattattaaggcatcgaacaaatccattgaagtaaattccgatttcttatccttttaactacgtaaatcgggtaaaacttcttgatgttagagcttggttgaggtatggttctgttctgcttgtagattttaaataaacttggagccttttcttgaaagacagctggctgtggagagccttctaccaactgcagttttagatacgttttgaaaatttcatcacctgaggtatttttcttctctcctgaaacaccacatggtacaaatccacaaaagtcatgcttcagttgtccaagccatgggatctgtgtgctagccccacctccccgcaagtttcctgctcattggaataatgagctgaatgtgttttaagaagtggttggaagagtatgagagataggtatcattttctcaaaggaaatgattttgacattattgagagaaattagacattttaacaattgttttgtaaaacagtcttttcaaacttgcacgttggggttttaaacacaaccactttacatgtgttgcgctccgaaaagtggagggatttgttgaaacactactctgctgagacttagggttccagagcacttgggaatttagcatagcttggtccccaactctctttgaaacactttacttttatacttttatcttgctacatattgggccttttccaaagattgtatttctgtaactccttattttacaaatgagaaaattgaaaataaggagattctctattcttagatgctgcttttactgacttaatgctttctttaccaataaataatttgaagcacaaagtaacatttcctagtgttatagttttgttcttgttatgtgtaacttatatgtatctgattaaactttcagtcatgtaaggatgattacttttaacctggaagtttacagcagtaccacattattgaaactataatgaacttcctgcacatggcagttgcctaagacattttaatttgatatcataaaacatttttagatcggtgaagtaattatattatgggaaaggtgtattaagactgataatgtttgaagttaactacctcaattatatttgagaaataatagtcatcaaattgctttttatttggcttgtatctttttatgtattttgtgtacatattgtatctttttacatgaggggctgaggtatatgacctgttgaagggaacagtgcagtaggagacaaggattgtttagtcatggctgtgctccaaaatatctgtgtccatggacaagtcctttaaccttttgagtttcagcttccaaatcagtaaagccagttgggcagattatattatcacatgtactgtccagttactacatttaaaaatttttttttatcaatattgtgtgtctagtcaacataccgttgccaaataaatgcctgttatgtgtcaggcacttagatgtttcagtgttctaaggctggatttctttctcggttctgttttatttaacaaattctaagttggtgatggttctttagaaaagctgttcttgtgttcttgtaagctattgatttttcttttgggattgggatgtgtagggaaactcttgagaggaaggaggatggagatttcatgggagacaaagggtggttgagactacaggtttgaacaagcacaggacccttggtagtctgatgtgaaggacattataaaaacacattatgaaggttttttctgtcacttcaagctgggtcttgttaaacctttgaaaattctctaatacctcatttgtttttgaaagaaatctatagcaacatcattttgtcatgtggtaaatattgctgagcagtcactaaatacctatagtcttttagtttgttcagattacatctaggccatttgtttactctaatagctaatagaatgtacagctgattttggtttaactgtgcgtgcatatttgtaatttttaaccaagaagtggcatatgtccacaaggaacttgttatctctgaaatactcacccatgagagctggattaattttttaagatgtaaatctatgctcatgtagaaataatataacaaggtgatattttgatgatcctctcaaatgattatctaactcttgcctgggcacctgactctgagtcagtatactcttgaatactttccatccttaatcaaatcaggagaaagagatggccatgtaagaaaattggccacggcagggttttataagagttaagcaagaagataaaacaacacatggccctgtgaaatatataaaccttggagaagaggagaaggtatagtgaggcaactgggtaaaagttgtgtcttcctctaagtaattttatgtcacaatatgtcctgtcttccatctcaaataacaaattttaaaattaagttgtgtttgttattttgctattagccaagatatataaattaactgacctgggattattagccatttgtatatgaaataaacttgggttaacctatatcaaaatcaaaagattgattatattctttacccttcactctttcaaatgtcttatgttctccatattacgtaacaattttatacttcattctgagtctccagaatatattctttgatgattttgacctttgaatgtcctggctatccatgtactacctagataatctcgttaccaggcttttcttttgctgaggcaggtcagagctagagaaagtaagcaattgagagaggcaagtttctgtatacctgtatctaaaatgtaatagactttataatttttgtaaggaactgaggaaaggtacaggcttttaatgtgtatcagtaaactagactcttatacagtttttataatattagagatgttttaagcttccttgagtaaatatgtgataaaggggggatcttgagtttttataattcttaatatgtttatttggaatccattgaccaagtgtatgtagtatccatatttaagatctggattaaaagtgattagtttctgtggctgatacgatttagaattaagatcttttgagactaaactacttctagatacagaagaacgtcatgaaagccgtactttcttggccatttatttgtgttaggctttaattttttgccataaccctctaaaatatgtgatgttatcttcattttataaataaggaaatacagggtcagagaacctaaataacgtgccaggatcagatctgggtagatataaaagtatttttcaagatattactgagtggatttttcccaattagatgaacctccttattaccaggaaccaaaatttcaaaagctaaacattaacacttacgattcatagattcctagagttaagcaagtccatgttagtttatgtaaagtcttccaatgcaagactaatgttttcttctaaaacattcagaaaagatttaagaaattaagttcattttctcattcccaaagtttcagaagttaacaaagctaaacattttatgtcttcaagtaccattgtttaggttaaggaatggaatccatgttaattctcaagtggttgatatccttaatgaaggatctagggaaatgtttctgaacagatgtaatcagtagagccacattgaagggccccgtggtggacatggtgataaaactaacctttgaaagaaaggacagtttgagtccctgttctcctatttcgtagccaggtgttcctgggtaagctacttgatttcttaaacctgtttttttttatgtcaagtggaaatacttttgtcgtaaggttatcttgaagatttaatgaaataattatataaagcatttgagatcttttctaccatgaagaaagtgccaaataaatggtagctgttattattgagtatatgaaatcttgagatacttaggggtatagagacttgcttagtatgagagggttgtctttcagtatagcttttgcagtgtgcctggaagccaaactagagattgagtagagaatttagaagacattgtaaactctgtgagtttagagagcttgcatttgaatagactaaaagttatagaagaaagagaaagttgagtatgagtagctttatttggctctgcaaagctggcaagatgtcaagggtttggagttaatgattaggtgggagtagatggttaaattgcggataaagagtaacagtaataaagcaaaggtgaatgttcaggctagaatgatcagtcagtaaggaaggacaagggttggtattttgaagaggagttacagtttatggttagaaatgagcaggaagatatcattgctacaggaaaggatgcaaaagagtaaggaaactaaatcattctgattaactcagttattaccattttttaaaaatggagtctttataaaaggcgttaaggctttatatgtgagttctaggttaagtctgaaaaattgtcttggaatagtgtgggtcttactactgcagacccaaaccaagatattagcattccaactggtctctttcctgctagcatcttgtactgcatctcctccctgattctataaaccatcaaaattctttctaaactatggtttttcattatatcatttctctcagtatacttcagtgactcccatttacctctggaataaagttcagaattcttggtttggcttttgacactttccatgattggacctcaagacattagtctgttataaccaaactagtacacttgctatctctggaacacgctcttttctctccatggatctttgctcatgctagtgtgcagtctggaatttgtgtctttccttctccagctttggttttctcttttagcaaagctcatttctaatatttcttcttccacaaagtcatctctgacccccagagtgtttaatctctcctttctctgtacttaaagcaatgtctgtgtattatttctatcatatgttttttttttttttgttttgttttgtttttgagacagagtctcgctctgtcgcccaggctggagtgcagtggcgcgatctcggctcactgcaagctccgcctcccgggttcacgccattctcctgcctcagcctcccgagtagctgggactacaggcgcccgctaccacgcccggctaattttttgtatttttagtagagacggggtttcaccgtgttagccaggatggtctcgatctcctgacctcgtgatccgcccgcctcggcctcccaaagtgctgggattacaggcgtgagccaccgcgcccggcctatcatatgttttacctttagatatttgtgtctaaattataattgcattcagttaattctaaagggaaaaataaatttttactttacacaaaggctagcggctagcacagtgctttatggatagtagacattcagatatttggtaagtattaagcaaaatctacctggagtgaaagtgattgttgtaggaggaggtagtagaagtagttacaagctttatcgtagcagacgtttctgactctcttcctgaatgttattttttctgaacctggatatttaagtgtgaagattatacaaatctgaagtgtggcagtgttcttatattgatgtagaagactaggttgactgatcctggacctacaagcttcattttaacttcctacattttggctttgagggttaacaggacatttataatcacatatctcttttcagagtattttacatttgcaaatattatcatgaactttgtgtccttttaaccagagaggaattgtggaatcacaggaattagatgatgtgttaaagaagagagataactatcagctgatttaatttgaacccaacaagtatctaataatatgcatactctgtgttcaaataaacctctaagctagactttcaagcttatcaaaatgctagactattttcagtgtttagaaaataccagccaggtgtggtggcttatgcctgtaatcccagcactttgggaggctgaggcaggtgaatcacaaggtcaggagatggagaccatcctggccaacatggtgaaactttgtctctactaaaatacaaaaaattagccaggcgtggtggcacgggcatggtggccacccgcctgtagtcccagctacccaggaggctgagcaggggaattgcttgaacccgggaggcacaggttgcagtgagccaagattgcatcactgcattctagcctggcaacagagcaagacatcgtctaaaaaaaaagaagaagaaaaaagaaaatacatagtaaaatttattggctttttaaatggataatttcatatagtcagtcagtgccggcttagatccatttgttagagaacaatgctaatgagacctcttgatactttgtgttcctcttatgttttcctagccttgacgttagcaactaacaatgataactaacattattgagctcttatgtgccagggactattacaatagattttcaattattatctcattaaatcttcatagcagccctatgagctagatactgttactacctatatcttaacagatgaggaaatttgaaacagagcagttatttgccaagagtttcagagctattaacagaagcctaatacatgttcttggactttgcagaaataatttgttgatccatgcggtttcattgctactgcggaaagtaagtctcttggccattgtgatgggtcaaaatctttgtacatgaagggtatgactgttgttccattgtatccagagagtgaatcttgtgattgagttgggatttgaggtggcagtgtatactaagtttgaaaagtatattatcatatgttagctccctttagaaattttccccaagaagagctattacattttttaatattaaaaaagcataagatatggccataatacaattagttccacaagccatacacacttttttcttatggcttaaaattttattcatgtttactactttgcaacccactgatataaattatttcacagatcctttattcaaatgaaattctcagtgagtctgagaagatagtcttaaacacaagctagctgagtttacaatagagattatactataaatggtaacttcaatgtttattgaaaataaattccttaaaaacaggtcttgtttcattcatttaaagagattatcaatatatgactgttaaatttttatagtctccctgttcattttctgatgaacacatgacagaaaattgaatgtgagctggaaatacagcagactatgagaaagcatgggtcatgtataatcactttaaatttaggctggtgttttgtattcatctataatatgaccacctcagggagggatgtaagtaaacattctttttttagttatactttaggtggcttaattattttaaagaatatgttattcaagaattgtctattgtactgttttaaagaataagaatataattcattaccaactttgaatgtcttggattcttagtactacctttttctttatcatgactagtaggatcacatcataatttggtactgtgtgtataaagatgaagtgtgcttacctttattaccaaaattcagaaatgaaaatgtgaatgataaaagataagggatggctatatatttttttgtttttgtttttccaaacagaatctcataacttaccaggctttagaaaaacatctttgcagtatgccatcatacctcagaatgttaagtagataggaaataaaattttcactttttgtaaagcagtagggtattatcctttctgacagcctgtaagactgttttggttgccaaggggccaatcttagaagtggcagtttttgttttgtgaccaacccacagcttaccctttgttagtccatatctgtcatcttcattttctctttctgcgtaaatgcttcttgatacagtaagcaggtgtttcaactagtcagccatctagtgtgatcttttctggtttgctacagtcagtaaaataagtagctctataagtgtaaatagtattacttgttttatgtagtaaaactccaagattaagttagagatatttttggctagactacattgaatgcattgacaatggatttcccagctcccagaaattcgtttgtgtctgaattactttatacttggcttattgtgtagagaaaactttagaaaaagttcatccatccatgaatgttgaatgaatgagcagattaataaataaatagctcagggaaagaaaatgtgtgggcttttagtcataactatgttttttctcttttgttcccttccttatgtgccatttttcaataatgggagtgtgtatctaatgatgttgataaactttttaaagtcattgatgaacagtaatctgaaaatcaagttttgattaagccgtagatttcttttagggtccaatattttctttttagaaatccactatgatatttttgtagggataaaagacaaccatgtattctatagatggaaaatggtaggatacagtttgttggccggccaacttctctgaaaatactttttcctgcatagaagataatcagtgttgacaagggagaagccaaggtataatggctgttattcatctgtctcatgtattcgtcaagtgtcatgtgttaaatatgaacaaaaaagacataatctctttcctcctggatcttaaaatctaaagtgagagataattcaccagataaatgctgcgataagggaaatagaggattctatgagcttatgactaaggatagatctgtttcctcagatgtggaactaagaagtggcagtagttgagaagttcattttgggccatgcgatttgaggtgtggctattcaagtataggaggtaggtggttacacattttttaagctattaaatagaactttcacttgaaaaggtttttttctctctttcctcagcatctatctccctacatacacaaaaaaattgcatgtcacaattcatgaactcagtgagtgactctattttgaaaaatgttagattatatcaactgaagtctgttagaggcaaatgcttttggtcatttttttcagcagggacatttcatatgtgtaaaatatttagaatccccatgtatttatatataaatgaatcttttaccatcttaaatgtttaataagttatatttttcctttctttcaacttaagtatacaaggttatcagcaaacatttgtagatgctctatgtgaggtgttttgtttattagttttaaggaagagaaaaaaggatggattggatcaggaagtcagttattgttttctgggttagtttgagtccaaatcctcaaatatgcggcgatttataagtagcaaactaggaatttaatccacttcagttttggataacttggataagacactttctgtctatagatctgtctatagataacttggataagacaagttatccaaaactgataaatctgaattagttaacagatgaggcaaattgagattgtaaatgctaaaagattattagaaaactttataaactaaatagttctatgccatgtctttttagtattttgcttgtactataattgtagtgaaaataggtcagtatctaatttttatagtcactagagctctccaactaaatttagcttagatgtttttctagcaattatatacttacaaagtttacttttaaaaattgtgtaatacatgcctttatagaaatttaagaaaacgacttatggattatgtacttcagatcacagcacaactagaagatgttgatacattacataaaaaatcaggaaacctatgaagaacatcaaaagtggcaaggtgtgttcacttgcactttgtgagattgaaactgctgccattatctgtgcaaactatggtttgagtacttttaatttagcaaagactaattattttttaaaaattttggggtaaaaaaaatggtctttagcgtagaagagctttacccgacttactttagttggttcaattggttgattttggtttgctttttgaaattttgtattgtcttaatttggggcacattgaactcaataacagttcagttgcattataattcatttgggtaaagtttattgttggaggagggtaagtaaatatttaactgaaaaagtgaagtaaatatttatttaaggctataagttgaaatatttgtcagctgagaaattttcaggtaacttttttaacctttgaaaaaaatttactatagcatgagtattttttatactgctatgtataatccatagtcacgttttttaacctttttatataaaatactgatacagaaaaccatacaatcatagtaatcttttaaaattgctttataattcacatagcgtaacattcacccatttaaagtttacagttcagtagtctttagtatattcagacttatgcaacgattaacacaatttaattttagaacattttcatcacctccaaaagataccctgtactcattagcagtcactccccattcaccagtctcccagcccttatcaaccattaatccattttctgtctatagatttgtctagtttaggtattttatataaatggaatacaggtaactttttattagtgatttttcacttacatgtgtcttgcatgtctcatgagatagctatgaataagttagccttcttttacaacttaaataacaattcttgtctgaccgggaaaaagtattaagttattgagagactgcatcccaatttaaaccaagaaccagactccttactagtattataactcaaaagaatgtgtaccattagcccttacctctggtggtgcttttcactgtgaattgttcagcagcctctcaacttcccgaaaataccacttaagtcttaaactcagacttgcatgagtttactgagatatgtttacctttgcagctggcttgcctagagtctaccttcttactaccctactaagtccagaatgaggaagaattaaaagcaagaaaggagatacagaagaagagattgctcaggctgaggaggggcaaagtgataagagcaggattagaaagagacattaaaaattcaaggatactgagtttgttggcatcagaataaatcttggaggctgttttaagagggaataaaacctagagggaaggaataaaaggcaaagatgttataaaacataggtaaaatatttaaaatattttgtcctgaattttgaattttaggcatatgtcagtgaagcacaaaggatagcccccttttttgatgagctttagtatccttaagatattttctttctagaaccttgtgtaggaattttacagctgaccataatcatgtgttctctttggtttgttccaacatctttggattggaaccagtacagagtaggaaacccatatcaccttgggattatttttcagataaatcttccagaggattaaatggcaccatccccgtcaggtccaagtaggaggggaagaatcctattttgggtgctgtcagattcagtgggctgtttagttcactttttatccagaaaatggagctaaatgagaaattgcagcttccaaagaaaatcataccttgattttatagatcaaagcctttctgattagatcagaattgttcctgagattttaggggcattcagttaaagtgccccaagaagagtgataaatcacatataggtgtaaagtcaataaagtcctatagtaagcagactggaatttagggggaggggaatacacactgttagactgttggtacctatatttgactactaggatgattatatattttaaattctgtattcagtttcttatcagaaatactgcctacaatatcttatacttaattttttaaggaacaggtgataaagataggttatattttcttcagaataattgatattcattatttaatagataaaatgtgttatctgaatgtttatagtagtagaaaccaagtttacaaaatgtctatatataatttgtttttaataaccaaggattctttctttacaaaagatttcctctatataaatcttcctgttttatagatgatctgtattataggagaaatgagtatttgttgatttaactggctaatctacaggactgagcattattagaggagtatttaaacatagaagtctgtgaaaatatttttagtgctgagggaaattggagggactttctagaaccgcaaactaatagaaaaccaggcatagtggctcaagcctgtaatcccagcattttgggaagccgaggcgggaggattgctgaagccctggagtttgagaccagccagggcaacacagtgataccttgtctctacaaaaaaatttttaaaattagctggacgtggtggcacatctatactcccagctacttgggaggctgagacgagaggatcacctgagcccaggagctccacgctatagtttgagttgtgatcgtgccattgcactatagcctgggtgacagagcaacaccctacctcaaacaaacaaacaacaaaaaaacccttctacctctgaacatgtggggatttaaagattgctatgatttaaatataaatcatgaatatagaaaatatgagaacagaagagtatttgttaaacaagactaagctgtgctgcataaagtaaggcactatcattgtgctggtattttctgattctcttagtgcaataaatgttaaactttactactaccttagccatgttgcagggaattgacatgaatagttcctgggttttggctgggtgcggtggctcacgcctgtaatcctagcactttgggaggcttaggtgggcagatcaggagttcaagaccagcccggccaacatggcgaaaccctatctctaataaaaaacttaaaaattagccgaacgtggtggtgcacgcctgtagtcccatctactcaggaggccgaggcaggagaattgcttgaacctgggaggtggaggttgcagtaagccaagatggcaccactgctcctagcctgggtgacagagggagactccgtctcaaaaaaaaaagttcctgggcttcaagggcactctaatgtgcacatcttaaattcttagagcctacttctatggacgatttatgttactgttgatggagaatttgattttcttttttatcttcccctttcccttggcctttgtaggttttttgaagtgaacatacttttatgtatttacttatttattgagcagttcccaaatggcaactttattattttatttcttcaactcagttgtctagtttacttcatttgtatctaatctatttaactcatcctttgagtttttaatatcaacattttaaattttatttttttagcttcaaaggtgtgcatatgcttgttacatggatatagcatgtataatggtggaggttgggcttctagtgtacccatcacccaaatactgaaggttggacccaataggtagtttttcaaccctcaccctctcccacccaattgtttttatttctgaaagtaatatttctttcttggtctgcctgataatttttttatagtttcttatttttcgttagttttcaaaaaataccttgttgggcattttgtccatagatgtactatcttatgtttgctaattccaatatcggaagtccttaggaagttgtacttaaggtagtttgtttctttctgtatttggtgattttttttatgagctaatatttgattaaaccgaatatttctccatcctctgtatagttgcctacaatgtaatttctacttttttttttttagcataaaagagtttcattttcctttttatactcaataacttgtttaattagccagtatttttaccagtttctttacttattgttccttgcatcttctctgagtccacttttcttcttgctgaagtacatcctttagtaatccttttagtaagaggctggcttgtaaatgtccttagtttttgtgtgaaagtatattttatgcattactttgtttttcagctagatagggaattcttggttgataggtttcctcccatcagcaacctcagtatattatttcattgtcttgtgaaacttggcaaacttggatctctgagaagttcgatctctgcctaattgttatgcttctgtatgtaattttttttttctggtagttttttaaaagatttcttttctttattctgtcaccactacttactgtgtgaccttgggcaagttcaaaatggatataaaattgtatctgtgtcatagggttgtaatgaggattaagttttaaagcacttagaacagagccttgcatattataactgtgacatgttaatatttgttttattttgccatacttgatattctaaacacatttctatgatatgcttaagtatgttgttttatccatagctcctctttgaaatacattgttgatgggaagattcatatctttctttgtttctagaaaattccttagccttcatatctttgaatattcattttccaatattccttcttagtctctgtattatgttctaggtggttcctcagtatcattttctaatttactaattcacactttgactttgtccagctagagtttatgtggcctcagttccagtgaattttttttaaatattcaggctgtctctctaatagccacctattctggtttgatttctgcctatttttaatttttcttcctttaatgactattgtggcttccttttaacatttgaaattattttcagattgtcattttttcttctagaatgaattacagttgttgattttattggctgtccatcttagtttagttttctttgtgtgttttgagtttgcttttgcagtctcctattgactggaagtttttgttgtgttttctttttcactcttcttatccagtgtttttacatgcacctacatctctgtctaaaaccacatctttatattggaggcttgattcccttgattcttggtaacatcaggatcaggcttctctttccaagaataagacacaaactaagatctatatttcttctcactggacacataatttcatctaaaccgtagccccatgcaatggttagtagtagctttttctggctcctttcattggttggaagagcctctccaccctaggtattggtttcaagcagtgagcctgagttctatcccagccatgcatgggtacctttttagtccctgttactatccctacaggatgtggacttttggccatctctgttacttgagcccagaaggctcacagttttagcttcaaaaactgctttgtatttaaagagttcagtggcttggtcttttttaatattttgtttgtatagttaataaatatttaacatacattaaaatgtttggaacagatacatttcaaaagtgaatatacaaatccatttggttggaagttagtccattttgtgttgctatcacagaatatcacagactgggtaatttattaataatagaagtttatatagctcttggttctgagggtggtaagtctaagattgaggggctgcgtctggtgagggccttcttgccagatggaaggcaggaatgcaagagagcacaagtgcaaacaagggcaagacggggccagactcgattttaccaggaactcactcctaagataagggcattactcaattcatgagggcagagccttcatcacccagttactttttatggactcactggttattactgtcacaatgacaattcaatttcaacatgagttttggaggtgacattcaaatcatagcagaagtcaatgtttaaaatcaatgtatatcctacatacccttcagaaagatactagttgactctcctacttatgagaggtatatttttttattcctttgccaatattgggtgtaataattttttaatctttgagaaggtaatgtataaaaaacaaatttgtgtttaatagctagcaggattggtcattgctccatatatttattacccatttatattcttttatttatttaattgcctgttcacattcattgcccatttcttttcctttaaggtgttcatttttattgtcttttaaaatagctgtttgtatattgtagtaatgttaacttttgtgtatatattgcagatgcttaaaagacgtttgcttttcaggttaatgagctttattttatagtgtaggagtttcttttctctggagtcactttttcttattcctttggaatcagtcttttcttgtcatccttagaaagtcctttcctaccataagattacagaaatatttgcatacatctactggtattgttttattattaatacttcagacttcaatctttaatctcttggtatttattttaaggtgtgatgttgaagggattcagctacccaccactggagggcaggagtggaaaagatcagctttcaggcacccattattgaatctctctgttcccagagagctctttctggattctcagttctattccactgataaatttattcctgcattagtattgcctcttaaatactataatttggaatcaagtttaaatatcaggtattgcagattctcatgattttaagaatgttttggctattcacatttattcatatatattttgaaatgatttaatcaaggtctgggaacaaaaaggtccagttgtgattatattgaatttatagattaaataaagggaggataaccatcttcacaattttgaatcttcctatccaagaaaaagaagtgtgtgttattctgaagccctcttcttaaaaaggttctatttcttgttatttatttagatatacttttatttctgttttaactttctaagtgattactgttaatcattttcatatatggttttctatagtcaaataatcttattgagtatttttttccctatcatttcaggttttgagtttgccatcatgtcattaactgcaaatagttgatctccttataattttatgcctctttttgttagccttggcttatctcaataaccattatttctacacattgctgagttacagggataagagttggtgtccttgttcttttttctttcctgggaattgttctagtactgagatttcctctttggcttgaagtaagtattatattaaggaataaattttatcaaatccctttcagaatatgatgagatgatcatatggattgtttttaacttttaaaaagatgacttacattagtcagctgcctaatgttggctcattgttacgttcctaaaatgatccctatttggtgatttgtaatatatattttactgactttttggcatctgtattaataagtatgtttggactatagttttatttttttagtgctgtctttgtcaaattttatagaaggattatgataggtttgtaaaaagaattggaaatttttttcctgtaatctatagataacttaggtaatttgagagttacatgtttccttagggcttgaaggatcttgttttgaaatagtcttgcctgatgcacttttatttttaatagcttattttgagaacaatccaaatttaaaatttgcaaaaataatacagtgaacttccatatttatttaaatggccaattgttaacatttttccacattagttttacagacttttttccctgtgtatgtgcatatatgtattcatattctcttggcatgcacacacacattttgttattttttagttttgctgaaccatttaagactcagtatggacatcatgaacctttactcttaaatatttaaatgtgtgtcccctaagaacaaggactatcactttctcttacataaccatagttcaattatcaaatttaggaaatttaacattcatacaatactattatctaatatacaatccatagtcagattttatcagttgtcccagtaatgtcctttataacaatcttcccctccccattccttcaccctttgccttcatccaagccagtccataatcacatattacagtttgttgtgacctccttggtctcctttaacctggagtggttctttagtctttttgcattttgtttttcatgagctctgaagttttttgagggatagttctttaataactttctcatattgttccaggtttctggtcttcactctagcactaattgaaaaaaaaaaaatttgttttccgagaactgttactttcctccatattttcaaatttattaacagagaattgtacagagtgatttattttacaacaataaaattctatttgtgaggtgagtatagcctgtttggcttctaattttaaataatttttttagttagactatttagtggcttacctattttatttttttcacatataacatgtactataattttacgtaatatattccttcagcttttattttattttgtatgtgtgtgtggttcatttttctttttaggttgaatatttagtatactgattttctttagtatactggtttttttaactaagtgtgaatttttttttttctattttcaacacactattgctggcttaaaggtgaggtttcttaataaggtttggtcacatctcagaatttgataggagatttttctcattattgtttctaaatattctataattgtagaaatatgtaaactcaatgcaaaaaactggtgtaggagcttactttttaagcaatttccacgtttgaggttttcttctttctttacacattatcaatatctactattaatgtataattcagatgtgtcatttcattatttcattttcttttttttttttttggtctgtggggtaggatgggggagtgtgttagaaatctataagcttttctttccaacatataatccaataattatttgatttttcaattaatgttttaagtgtgtttgaacagaatatatagtcttgaaattttggaccacatcttttaccaatttaaaacatggctcttattctgtttattgctttattccttgtgatttactttgtctgaaattgaaattgcaattcttggtatcttttttgcctagtgtatttcgaccacaacaaagtacttttatactgacatctttatttttgagtttcttggttttgattagtctcttgattgcatgaatctatctttaaatagtttattttttcagaaatgaaacatggataacactactttagtgctggcatatttgatcatgtcttcttcatgtcttcttattgcgtttacatataaatgacaaccttgctggtcgtagtattcttggaataaaacctctttatcctcaacgtttataggcattacttcgttgcctatcatctgatgttgcaaagaagtctgggaccagcctgatttcttttttctttttcttttttggcatgtttattttattttttttatttgagacagtcttgctctgtcacccaggctggagtgcaatggtgcgatctaggctcactgcagcctccgcctcctgggttcaagtgattctcctacctcaacctcccgagtagctgggattacaggcgtgcgttattatgcccggctaatttttatatttttagtagagatggggttttgtcatgttggccaggctgatctcaaactcctgacctcaggtgatcctcctgccttggcctcccaaagtgctgggattataggcgtgagccatcgtgcccagccgatggcatgtttattttgtctgaattgtattcttaaaatttgtaatcttcaaattatgcttcggtattggtcagtttctactaaatgtatctagtacttgataaacgccattcaatcaccaagttcagtctttagtttatgatttatttcttctgcctttgaaatttaatttttcttccattatttggttttcttatttacaatgtgctaattgagctgttggatctgcattgtttgtatcttttctcaagtctacttgtttttgtttctttatgcttacttgcatactggatgatttttgtcctgttcgtttttaccccttgcagattgtttgctgtagtgtcttcattcctcattattgcttttcatgacatttaaaatattgcaatgatattttttctctgaaatatctttttttaaaagctctgttgatactttttatattctggtttcttttcatccctgtttcacaaattaggttttttaaaattttcttatatgtaagttgtcacctagttttctaaggtaaatcttttagactgtgacatcatgttcttgagtacttttttagttacttttttatttcagaatttttgtatgggttctataaatttttttctgcttttttacttaaagggtggcagttttctctgttgtttgcccaaaaataactagctactccttgcctgttctgtcattatactaggataccattacctctttcccccttggaatttaacaggctgaattatattaaattattttagttatcatatttcattatttttgagagaaatgatagggattttgtcctattaacctgttacaggtaagaaactttgtctttcttgatttttctcgatgcttgttgaaattactgattattttagttatcatatttcattatttttgagagaaatgatagggattttgtcctattaacctgttacaggtaagaaactttgtctttcttgatttgtctcttgatgcttgttgaaattactgcacattttcatctttacaagtttggcagattttctttcccaacagaagaacttgactattgggcattctgctaatttccatggctgctataacaaattatcacgaacttggtggcttaaaacaatacagatttattctcacagttctggaggccacaagttcaatatcattttcacggggacaaaatcacggtgtcaccaagaatgtgctcactcccgaggctttaaggaggaatctgtttcttgctttttttcaccttccagtggctgtcagcctcatcacttgcctggtagccacatcactcgaatctttaagaccagcgtcttcaaatctgtgtctgctctgtcttcacatcaccttctctgtgtgtgtcagatcttcccctgactctctattctaaggacatgtgggttcacttagaggtctctggataatccaggatcctctctccatctcaagattcttaatcacatctgcaaagacctttttttccaaataaggtaacatttataggattaggactggtatctttgggagtcattattcagcctactaggtatcattttgttttgctactttagagtgaggcagacatattagtcaaaaattggattagagtaaagcctcatagattgtgctgtttgttagaatcacagatactgtcctctttaccgaatgatgcaaactctgatgccatggtggaaaagtatatgaattgaattggatgtggtcaataaggattgctagggactcgagaatgcatgttgttctagggagaggaaatacgtgaaggtcaaattcaggttatcaggttatcagtttgtaacctagtttgtagctgcttttttcttttcatttcttacaagctggtcttgctgtagtaaaataattttgtgtgtctcttataatcttgatattgagaataagaggttttttttttaatgggaattccatccacatgattttaaagtattactttactaatgatatttacctaggtattcctagaactttagtcttctcatgtaacattttatacatttctcagaacaaggtaattgacaaataatcaaggttgcttatttattgatgaggaaagttagacattaagccaaaggacttgtccagtatcgcatattggatagacctataatttttaactttaatcttgtggtgacaggtatttccatttttttttttttttgatgtttcatatgtgctttgatgttgatgtgtcatgtgacatgaagtgtctccctattgttggataattgggcaagtctaagttctttttactttatattcctgattttgtttttctagatgtgttatttttacagattcaggttacttctttttttaaatcatgttattagagttaaactaatgaaaaatcatatagagatgaacttggttttgaaatataatgagtagatacttgcttggctggaattttttctcacaagttttttataaagatggtatgagtgtatactttgtatccaggaatgtgtgtacactagggggagtgttggggggatgagggtggaagacattttaagacacacaggaggctggtgtggtggctcatgcctgtaatttcagcactttgagaggccaaggcaggggaatcacttgaggtcaggagtttgagaccagcgtagccaacatgatgaatccccatctctactaaaaataacaaaaaattaactgggcgtggtggcacatgcctgtaatcccaggtacttgggaggctgaggcacagaatcacttgaagccgggagccaagatcatgccgccacatcccagcctgggcgacagagtgagactctgtctcaaaaaaaaaaaaaaaaaaaaaaaaagacacagaagaccctaagtgtacactcagatgctctttatatccatatccattatcagtttggtgatacgttattctagtttcatgaacctttactcttagaacttggtttattctctaatatcttttggattcagttttgcagttgagatggctaatatcaatttgatactctttccttttatgattgctcatgtttttgtctagaaccttgcattatagtatttttttttcttttccttgcatttctatagttgtgaacaactaggagtgggtttttagcaattaattcagtgagcttgttaattttgaaaaggcttcaactgaggaacactttcttctcatttctttgatgatagcttctctgtttctccttcagaaagtcttgttttttatatgcatatttactttttgggtgcactctccttgttaatgagttatttgcatctgattttgagtttattcagcaaatatttattaatgatttactgtatactctgtgcttggggagttgacctagggaactcaaaggaggctcctttgaagaattgatgcttgagctgagatctcaggaatgagtaggaattatctaagacatgagagaacagctgttaaggtagggaaagtagcatttgtttatatatttggaggaaggaagtatgatgagtactaggtactgtaagaaaacccttgtggttggagtagagaatgtaggagaagggacagtatgaagtgagatgcggctagagaaggtacgtaggggcttgacttcccagggccttcatgtgagccatattaagcagttatttatccacctcctacccccagcagtggaaagccattgagaaacttttagtacagaagtgatatggtgaaatttgtattttgaaagatttacttaggctgcagtttggagaatgaattagagggatgccaggatccacgtgaagagactaaagacgctagtattctgcagtgagaatgatggtaacttgagaccagggcattggtagaaaaaagtggacagatttgagaatgcttaggaagcatataacccatgggatttgatgatggactgatgggagatgaggtagagagaggtatcaaagatatccttagtttctgtttctttttctgagttggggtcttgctatattgcctaggctggtcttgaactcctggattcaagcaatcttaccgccccagcctccaagcagttgggactacaagtatgcaacaccgcacccagtgaatgttcttggtttgtattcaccttggtgggtgatggtgccattcactggtaaaagctgcagatatgtgagggtgctcagggaggcagcatagaatgggaaaagggcctacatgtaacccttgaggaatgccaatgtttaatggcttgggagatgaaaatgagcctgcaaaggagacgacggaaaagcttaggggtaggaagaaagctgggagtgtgtgtgtagcatcttgaaaggccaatgggaagagtgtttctggagggagtgttatagttgaatgcttctgtgagcagtcaattagaggagggctaaaaatgtcccttagattaagtgacttggaggaacttgatttagtaaaatggccagacagccttttggagcatcaacattttttttaagaagtttaactgtaaagagaagagaggcacatgggtagctcgaggggaataagtcacatgaaaagttatttttaatgggtaacatgggtgacacttgtggctttaaaagtcacactccaactgagaaatgttgataaaaaggagaaaaaggaaaatagtgtaacattcctgaaaaaactgtcatttaagactcctttgaaacatgggcaccaaagctagtctagtagaggatttattatcagtgagaggacagagtcctattacagcagaaaagtaggaggggagggttatgaaagaattcattgaaatggttcactcatttattgatcttttttttctgtagtatccaatctgccattcattgtctctattgcaattttcagttcagtaaattgcttctcatttccatgaaactattttcagagtacctcttttttaattgacagtctgcaattgttttattcattcaatgtcatttcatatcttggttagtttctaattttgagctaatgaatactgagtctccctcttttcaacttctgaattaaaaaaaaagtcatcttatttttctctgttcatttttacactttatttagcctaagtatctgaaattggctttgctagaaattacaattagttcactgttgttttctttcagtcccagacaaaaaagaaaaattttagatttctttcttttctcttcttccttttttttttttttaaggtcatttatctttggcagttttagagatttagaaaagaaaatatatagacttgtaggcagaagaagatatggcactgagggaagttttagttttgttctgtgacagtcttccttatcttgtatgttgtctttaaaaagcctacacatttagattttcattacctcatttgcaaggatacaggatagcacatgtaggagaattggagtgtaagtccagaaacctaagtcttattcttagccttactgatgaaccagctttgtaaccttgggcaagttattctgtttctctgcaccttctcatttgtaaaataggtttacacaaatcatttctgcattttggctctgattcattatgcaagttatcaaaatcaaatttgtaactataaatgagtaatattttattatttttatttttttagagacagagtcttactctattgcccaggctggagtgcagtggcaccattataggtcactgcagcttcaaattcgtgggcccaagcagtcctccttcctcagcctcctgagtagctaggactacaggcatgcaccactatgccccgctaatcatttttacagagtcacgctattttgcccaggctggtcttgaactgccctcaagtggtcctcccacctcagtctcccaaagcactgggattacaggcatgtgccaccatgtgtggctctaatcatttttaaagcaacaatcagtgggaaatttcagctccaaatgggagaaaaatttccaaagattagccttttttttttttttttttttacagatttgctacagttttgttaatgtgcttatttctcattaccatagataactttgagatggctgccttggattacaaactagaatttattactatttcacatagcttgggaaattaagtgtagtttgtgtagcctaaattatcctttatagagatgtagctgcaagggttagcatttcttctttgaaccccaggtatgcagtatattgcttaatactctattgttccataaatatgcattccagaagtcagctgaccatttgtccttatctttgaggacaaagcccgtacatatgtaagcattagtgagcaatgtagaatataaagatttggtagcagtagagagtttacgctctacatcccactgcaagtaatttgaatattgccatattatccactgtgacctgtgctgtttgttaacgttccttttccccaccttccccgaggagcttgtagtctctcactatatatttttttctctttggatttcccttcagcctttagatttcttatctctaatgcaagtctactctagatttttctcccaaatgtttaaaaccaaacctattatctcagtggtcatcaaaggtcctctagttaccagtatccacccttcttggaatgcctgtttagcaatgttcttttgttatatgagtaagaataactctggtatttgctaagagaatataattttctccacattgtatgtatctatgtcctttgtttataaagcctggggggcgttccctattaggttaagtgtccctacgtaaatagaaaaatatgtagggttttattactcaactttttaaggtttctgctcaaattgtcagttgaataactcttgttactttggggctaacatgttgcatagggattttaacaataaaatatatagagcattttaaaaattattcactataattctgagtggattaaaccaaatgaccgggttcaagactctactatgagttcacctttgcttaataaaaggcaagactgaacattaattaatgacttcttggcccagccttagaatttttcagtttagggattagtttggtttttaaaaggtacaaaatgttcatgaaattttctgattatatcaaatattaattcagtcttgttttttgtcatagtactttgttttgaaaagttcagatcaactgataatactagtgctgtgatgagactcagcttgtactcaagaacagatttatgactaggtgagaactaaaatttctctcagaaactaactaaaaactttcatggacaaattgaatccccttgggatttactatttatggatatacgccaatttaattattggactaaataaaatactctttattagtccacttatggaagatgactgtgtaaacatagtatttgcaagtaagtactttttggtattatatttatataatcagctcttgtatccatgtagcttatagttggctgcttcaccaggactctacaaattgctcagaacccaaggaggtaagatttttatattgcctgttttcagtatgtaaaagtccagccacaaaactattaatttacccttgactatatttttacagttgctgtggagctgaacctaaaattttgttagatggttacttggtttgttacatttttatatactaatttatatactataataatatactgtatatattttttaaagtctggggtttgtttttagaaagtatattctatcttcaaagaattatttggtagtttcatgtgtgtatctggaaaataactactgtacttctttataaaagtgagagtgaggtccctgctagttgaggctggaatctagacgtggctgtttatgtaggagttagtaattaaacagtgcctgtttgctgactgcctcatttttgccaggctctgtatgggtgccttgcaaggcattgcctcatttaaaccttgcagcagcattcagaggaaagtattaatatgcccactgtacagatgaggaagttgaggaatgctttattagtaggtgtgaagtgtcttaagcataatacctccctcctcaaccttgctccctcatcctagttaagggaattgagacacagagataaggcaatttgctattgaccttcagcagatgacttaacctcaccgtggcttagtttcttcatgagtaaaacagggtacctatcttttaggattggtgtgaagattaaagaagttaatacatatacaaaactttagaacagtgcttggctagtagtaatctctccataaatgttagatgttattattaagcctgtgactacctgttatctcatgtagttgttcagagataaaaatgtaggctataggaaagaataaggaggaaagccaggctcctaatctgtctaagatagaagtgaatcttagttaagttttaagataatcctatgtgcttttaaaagatttcatggtttgcggtttgcttttctttggctcccagtttctttttttttttttttgacttcttagtacaggtaacttttgaaggaattcagcttaccttagatgaaccaaaggaaagctaaaagccgagataatttagaaaaactaaagcagagattatgttcctaaattccctctttctgcttcaaagtccaggaaacaccacctgcagatacagttgtatcccattgttagaccctttcctgaagccatcctcttttctttgtcttcccagagagaaactagtcattcgacaaagattgaacttcttctgtgtgttaggctgtgctccaagtgctgggaagacaccagtgaataaaacaaaaagtccctgctctcatggagtttacagccactattctaaagtttgtctgtattctgcctgtccttgtttttatacttttagcaaatatgtgtatagaattgttttgcagccttgttcagcatattgtcttcttttgttttttaggaatatctgtttatgtaattagatctgtttttgataaattgtattctgttatttatccttcctaccttctaatgagcagttaggttatttccaacattgactattatggttctccaaaaagatcattgaatatgtcaccttggatggatggatgggagagtttcttcaagacagcatgtttcagactttttgttgtgaccacagtaagaattatgtgcacctcagcttagtaaatacaaatatacacttgggacaaaaacttcaagaaacagtatttacttacttttatcacctgggatgcactctattttgttctgttttgttttcttgagacgttgtttcgctcttgctgcccgggctagagtgcaatggcatgatcttggctcactgcaacctccacctcccaggttcaaacaattctcctgcctcagcctcctgagtagttgggattacaggcgccagccaccacacccggctaattttttgtattaatagagacagggtttcaccatgttggccagtctggtctcgaactcctgacctcaattaatccacccacctcagcctcccaaagtgctgagattacaggcgtgagccactgcgctcggcctattttatctttttcaaatgcagtttacacacaacccagctgattgggttgtgtgtaacccatactgattaaactgatttatcacccgtgttcattatttttaaaacgttgttttgagatctataattagaagtggaattgctgagtagttgcttaagtgtatcttcaacttcttcaactagctgttgccagttgcaattcagagtggttgaaccaatttaaactcctatcggcactctaggggagttcctgtttctccacattctgaccaactcttgatattgccagatggatgagaaatggcatttgttttaaatgtgccttcccctatttactaatgaagtgtttaaagtgtcttttaaaatatatcacatagaagtttaatttaatggtaatcagagctggcggcaaggaggaaatattattgtgattgactgcctcctctggcagaaaaaatggtgtaaaaattatataataatatctatattatattgagtatttataatttgctagacactatactttgtgcactgtatacattattttatttaatcgtcataagaatcttgtaaggttagtgccttcttatatacttttttttttgagacggagtctcgctctatcgcccaggctggagtgcagtgatgtgatctcagcttggctcagtgcaacctctgcctccaggttcaagccattcttctgcctcagcctcccaagtagccgggattacgggcatgcgccaccatgcctggctaatttttgtatttttagtagagacggggtttcaccatattggccaggctggtctagaactcctgacctcatgatccacccacctcggcctcctaaagtgctgggattacaggcgtgagccaccacacctggctgccttcttatatgcttatacaggaacagatggagaaagagattcggaaaggttcagtagtcacactattactaagtagtagagccagaatttaaacccacattggtctaatttcataacttattttctttagtacttcatgctattggtgaattcgtagaggaaggaagtttgtcattactattcttttctgttggtttgtctcttaaatgtgtttaattttttgagtttcactcacgtctctttttttctttccttttctcaaggtagtggagtctttcctctgtaaaacttcaccttgttgtttctagtctaggatagtggtcttgtaacctaggatagtggtcttggttactgcaattttggttgattatttcttgttggcccttaatgtgcccccatcttctgccttaggcattccatctaatcttttccagcagtttgcaaccttactgtgcctcagaatcacatatgaaaatttaaaaatcatagatacctaggttccaaccctaccctggaaattctgatttggaaatatttatttttcaaaaagtccacagataattctgttgcacagccatggtagagacccattttcttaggggttaatgatgctttagagtcacgcagacttgaatcagagccctgattcctttaaacttattagttgagtgatcttggccaagttctttaatcttggctaaggttcttcatctataaattggagataatattattatctaccttagagagttgttgaagagattaaatgaagtaatgcttgtaaaacacttaccagagggacttagaatacttcttaaacattgcctgctaataaggtgtcattattacgttatcctttatccaatcaaaatactcacctttgcagtgtgtatcaacttgatgtcagaaaaataatctgataaatatcaccataagggatggatgatagctagttttcattacttacctttcgttagttgaactgtactaggaggcagaggagtaggcagatggttttatcacgccaatcagccagtcttttctgcctatgtatcagtttggacctataaggaaaatgaaggggaaaacaaatgtttttctttccttcctaggaggattttcttcttgccctttttctcccagtttcctctctgagctgagtatcattagcatcatcaataccctagtttcagagctgcgtagtgatttacctagatacttttctccaccattattccctactacctaactcctcttcacctccattaaatctctgttcatcatgctatccttcttttggattgcctttagttcagttgtgacttacttgattacttgaacccaggtgtctacatttctaagctattgttcaagtaagggccaaggtaaattctaaccagctgtctctttgccttgtgtgggcccattctagaccagcgggtgttaacttttgagtattggaaaaggattagattagctgagccttcaggcttgtcagcagggctgtcactagaccctttgatcttctttatatacctaatggtcatagagtataataataatggtacatgttattactatatgattaatagattactagtagtaattttgttatatatgtatacagtacacttcgttatgtatatatataattgcttgcaacttgaaatttgaggctacaacatttacagtaatttaataacttaactgactttatcaaaaactgaaaaacctcatggaaaaggtagaatgtaaggtagacttaaaaggataggtatacttttttctataaataggatgaggcaagagtttccagttaaggaaactgacatgagcaaaggcttgaaggagcatgcaaatttggagcattgtgagtagattattttttagtttttcagagttcatgcagtgggaataaaactagggagtttggaatcaagcttgaaaattcctgaatgttcaaccaagatatatttgagttagtagattttttgggtatgtcatgaattcgtttggcttttcttaattgatatacatacaacttagtcctgagcttacacatgttcattgtatcattaaacatttagcctggttggtttaagttgatggccactgccaggtctcctttctgccttctcccctttatcccaatgctttagtttttttctgcctttttgtctgttgtgatctgtgcttcatcaggctttcccccagttcctccttgttaatctccagattccaagtcagcaacacaatgaatgtctgcttatcgcgagttgtgaattcccgcatatctctttcacttattaaaaagattgtttggtacatattttgtttataagacagttattgactttcctgtttctcttcctttgcagacctagaggatcaagacataatgggagcatttttagacaagccaaagatggaaaagcataatgcccaggggcagggtaatgggttgcgatatgggctaagcagcatgcaaggctggcgtgttgaaatggaggatgcacatacggctgtgatcggtttgccaagtggacttgaatcgtggtcattctttgctgtgtatgatgggcatgctggttctcaggttgccaaatactgctgtgagcatttgttagatcacatcaccaataaccaggattttaaagggtctgcaggagcaccttctgtggaaaatgtaaagaatggaatcagaacaggttttctggagattgatgaacacatgagagttatgtcagagaagaaacatggtgcagatagaagtgggtcaacagctgtaggtgtcttaatttctccccaacatacttatttcattaactgtggagactcaagaggtttactttgtaggaacaggaaagttcatttcttcacacaagatcacaaaccaagtaatccgctggagaaagaacgaattcagaatgcaggtggctctgtaatgattcagcgtgtgaatggctctctggctgtatcgagggcccttggggattttgattacaaatgtgtccatggaaaaggtcctactgagcagcttgtctcaccagagcctgaagtccatgatattgaaagatctgaagaagatgatcagttcattatccttgcatgtgatggtatctgggatgttatgggaaatgaagagctctgtgattttgtaagatccagacttgaagtcactgatgaccttgagaaagtttgcaatgaagtagtcgacacctgtttgtataaggtagctagactttttttaaaaacataaaatgattttatgccatattaatcactactctagtatttaatcatcttagaatctgtaattctgaaaccagtttttggcacaactgtaggatactgttcaccaattatgaaaatatatcataggaccactatgtagaaataaattacccaattaccatctctgcaagagttataagctgaatgtttagtcttactacttgagctttgtaataatgtggaagattatcaaaggtaaaaagattttatcagagtgcatgttttgaaagaaagagggtggggagggttaggcctcagtgtctataaatgaaaagcattttagagttttaatatttgaccatgtgatatctcagtacatttatgatatcctaatcctttgaaactaaggtttaatggtctgtagcacttgaaagaggaatgtagtgatcattagacgtgatgtaatagaaatagccttgtacatggagtcagaagaacttgctctgagactgtgtatggttttaggtaagctatttaaactctaatcagtttttttcatcataaaaaggataagacattattatcttgtctcatggcgttgtcaggaggatcaaatgggataatatacacaggtgagctagctcagcccctttattttacagatgaggaagctgaagccagagaaggttctacaaacttaagagtcagacagacctgagaccaaggcttacctctattagttttgtactctacattcctgaacgaattgttcaacctctctcagctttaaaatggagataatagtatcttataagactgttgccgggcgcggtggctcacgcctgtaatcccagcactttgggaggccgaggtgggcggatcacgaggtcaggagatcgagaccatcctggctaacacagtgaaaccccgtctctactaaaaaacacaaaaaattagccgggtgtggtggcgggcgcctgtagtcccagctacgcgggaggctgaggcaggagaatggcgtgaacccgggaggcggagcttgcagtgagccgagatcgcgccactgcactccagcctgggcgacagagcgagactccgtctcaaaaaaaaaaaaaaagactgttgaggaattaatgagcgtatgtatatatatatatatgtgtgtgtgtatatatatatatacatatatatatatataatgcctagtttagcatataatacatgctacaccctttcctacagatattataaatgacgtgtacagggttttatacattgctaacagcattaagactagaaaatcaaggcccttgacttgggttcagtgttctttctgccacactctgttctgttttgtcaataatgcttattaacttattctttgatgtttttttaaacaaatgttgactttttaaaattcttctgagggtatatatttgatactcaaatatttaattatagcatttgaatacttagatgtctttaaaaatgaatgtagttcctaaaagttgtcagtttttaaaattaatacaagttaaaagctggtttataaaccttaggtagttttacctcttatttcatatttctacttatgaagcgaatgtattagccccacaatttataatttattttaaaggtaattttatcaggtacatataactacaggtcaaatcctattgtaaacaatgccactaaaattttctgtcatgttgtatggaaggagtgtgtgtacacatgtatatttgtattaggtatcacttcaaattaagtcaccagtaaatgtttagaaatagtattgttttatagaattataaaaaattattattacagtgagattaacctgtaatgtttctctcctgtcttttggagtattggttatactgtattctctctatactgttcgggggagggggagtcattgcacacacacacgcacgcatgcgtgcacatatgtatttttttctccctgaaagtaacattttcactagaacaagtataactgtaattggcacagctgtaaaggttctcaaggctttgaagagcaaaaagaaaactaaaatattctcaaatttttttcttcccagggaagtcgagacaacatgagtgtgattttgatctgttttccaaatgcacccaaagtatcgccagaagcagtgaagaaggaggcagagttggacaagtacctggaatgcagagtagaaggtggatcatttaacaaaaaataagtagctttattaaagaaaaatcttcaacacaatcaaactttaacattttagcttttagatttttatgtgtctttgacagctagtgtctagtgtatgaaagtggaaaaggacatttctgtagtagctgttaagatgtatgcagttgtcctatcacagttatattagaaataacaactagtgtggaaagtaacccacattctgttcaggatacttttgttttaaaaggctaaaatgtttgtgtgctttaaaattcttaatgaattcactggcatgagtaattttatgccgggaaaatctgatttgtggtctatttaattacaaagagattgtgatggtgataatttgaataccatctttctatgaaaagctgtgtatattaattttaatctctagggccttttttcaataacttgaaaatcacagcctcatcattagcaactttatatacacagctttaaaaaatttgctttaaactgtttcagagcttcttccctaagccataaactgtctcacctaaacaagatagacctcaataaaagacataatatttctccacctggcagaaaagtaactgccaagtaagattaagaaataagttgagcatttctggagtatatttctcataattctgcagagacttccagtttattgcatatatgcagtaaagtgtatatattatgcagtttctctaagtggaaaaacttgacatgactttaatagtgttaaaacatgaaaatgctggtgagctgaggtagaaaaaaaacaagaaaaaaattttaaaaatagcgttaaaatgcattttaggctcctaatgtcgttaatttgcacgttaaagacctctaatcgcatgcaagcattgacctaccacacctacatcccactgtgcctgcattattgaaattactactcactttaattttttttcccctttttactgtttgataccaatcataatcagtctgatactagaatcatgattggttttgttctttagtactgtctagagctactattttgtttttattgctgtccgccacttgatagtcatacatctagtatgtgtttgtactatttagtattgcattcattggacgtactattcaacgaatttgtctccttactgttaccaagggtcttggaatttttatattttaaattaatcattcaatataagttatttataggtatagtacaattttaaaatatttagaatgctacaatcattggttcaaactattgattcatgggaaaatttaaattcataagaataatatgtatagggataagttgatatttaatgtattggcactttaacttgggcagacatgttttcttattggtttaaagaagtaataagtattttaatatttttactatgaaatgggatccaattttagaaatgaattgctacttttctctttagtgtgtacactttaagttttagatggaattatgaaatattcactttacgttattttgttacaataataagttttatatttcttattatcaagcaagagttgccacctggacagagtttacattgatactcaatatttttgatatgttaaagtgttattatacttgtaccattcaattggagattgtcataaattaaatatggtattttttactcagatttgatgagactgcaactagagaataaatattacattaaaattgctgctattttaaaacatagaatgtaactgtttgtattgtaaaagttgtgtgtcctcagtgaaaaatactgccttcagcttccaaagcaggcacctgaatgcctttttcttttctctctctcttctttctttaaatacatgccttcactagattgctgtgacctactaaacctcattttatttgcttggaacatttttggcttctctgtccacaccatagaaaaggacaaaggccttccagctctccttttctcttatttgttcccttctaaatacttgactctctgggggtgtgaaaagattcagctcataatttatactactattaattttgtggtccttctaagccaatttaaaattatacttttgtgtatatattttcaaaatctttgctactgactaccttagctttaaagttgctaatttggagatgactgatagaatccctgaaacttggtggaggggagtggaaaggagcagaatgtgtttgtgtatatgtatgtgaaacatggatcttctatatataaatattctttagaaaaagcgttcagtctttttacaattctaagtaaaacgtataggtcaacagaaattaaaggaatatttcttaaaattcatttatttttcttttttgaaagcagacagaagcaaggctagtatagtatgaatggtcaggtagtttaaatgcgttgtcccacgtggaacaggagatattaactgtttttaaagctttacattatttttttacaagaatttgttttcctgtaattttcttcacagttaaaatatcctaatttatattttaacaaaagagatgtaagatacatcaaatatagatgattcaaggtaatgttttttagacctgaaactattgattcaatttatcatcagtgtttatttctattgtatctagttatctatccaaataattgtattggcttagcggagactgtatgttaagtgtattagttttagattgtgaaattgtgcagtttaggtaaacatcaaatccctttatttttgtacagcagatttccagcattagaaccatgtagaacaaatatactagatgttaaagattacacaataaaggaacttggcaaaccaaatctgagatccttgctttttgttcagatttaagactgtttttttttttaaggcaaaaaataatagatggtaaaaatttggcctttattctaaaaggacagtttgaaccatttaaagaaatattatgggtagccatgtctttaaaaattttgaggcctgatcaaaggacgaatctttatacacattgttattttcaaaggtatttacaaattgagaagcagaatgatgatttcttgccccactaatgacaaataaaataccatttcttaccataaacattgaaaaacaaactgaacaaaacttgaccatataacttacaaatacttttgacttgaatttgcatgtggagtatgtgtgctaaaactgcaagtgaagactttttatacttagaggaatagttgtagagttctttgtaaggttctttgttcataattttttatattttgtgatgtgaataatagtatgcatctgcatgacaacactgcagatcatattgctgtgcccttttaataactggatattttaaaattattttaaatgcagttgtatggtttatcaaatggttctctttttaaacattttataaggaaatttagaccttttctattcaaggctttgttgaagtaatcagtgaaggaaatggtattatatatctatacagtatattgtttaaaggtactttagagaagaattaaactgagacagtgatgttcaagtacataatctgtgcatgctatttaagtatcattttgcaaatataaatatatacataaaaataattgagttagtatataatctataaattcccctataattaagggttgttattttcaaatcttgaaattgtttattttttaaaattccacgcagtgtattatatagggcaaagttcaggaaacatgtttccagtctaaagagaggagtgatgtaagaagaaactagttgacatcttaagaaagggtattctcacttgtgcacacatatccttgattatataatatgctgatttaacatgaaatattttttcacattttaattttgatttgaagttaatcttatatgtcattttgtgcattttttgtcataaatcttcaaaggtcaacctgattttttttttttttaaatgataccagattagaaaaatctcagatgtggtaaatgccatctttaaaaagctaggttatctttgtttcggttttcttttcaattaaatttggataacacttacaaaaaaagtacttctgattcccagaaatcataaagaagcagggggaaggcgtccccgacttagtccatgtgatgcgcacattagcgagtgagaacatccccagcctcccaccagggggtgaattggcaagcaagtaagttacattctgtacactcttatgctttatgtcagtgtatgaaaatgttaggtattcattgataaaatgtttgtttgcctaatttctgaactgatgcagttatctgtgttttaacctgtgatttcaatttttttttagtattagaatatctagagtttgtttagacataggtatcagtatcattgtaactaattgcagtgagggttgtctttattggaagcttggttggcattgatttcctcatagagcataaacgagataatatactgaaagaactttttaaactaaattacatagcactacataaaaatttacaaaattctaagtgtcgttgttagtagtagtataatttgatttggtcaatccctgagtaacttaacaccctgaaaattccccttcctcatatggaccatgtttctatgcctgattttcccagtatttttggttgttgattgctggttagttggttttaggtgtcagggaagaagatagaatatatttcttgtcttttccctttccactttagttcatagaattggactactttgtgttaaatattaagcttacacctttacataataaagtggaaaattcaagcaattccaagggttaaaacatttttacctcaaatatccatataattgacttacaaacataaaacttgcaaatacctttagcttgaatttggatatagagtaaatgtgctaaaactacaagtgaagacttcttgtacttacagtgaagatatattattgactaattttctcgattctctactgtgttttgcaagtgtgaccatgttctttgtaatcactaaatagtgattgtaaaagctcctgtttgaagcttttattttttggaaactttttttttccatatgactttctatgaaacgatctataaaattgcttcaagtcaattttggaagtagggagactataacttataaatatactacagatttttaataaagtgttactcaaaactaattcctagacttgtcatggaaatgtcttatttgacatttcagttttaatagaacttttgaaaagggcattaagaaaagtagaagcttaaatataaagtataatctgagacttcaaaactacgatgcaactcaactagcttatgttagtattatatcttaagaatggcattgccattgatgactcataaccatttaaaccaattcaaatggaagtagactatatagactttttttttaatctgtaatttttagccttctattaactgggttggtagagtgttataacacattttagagtagactcacctctgctttaacataggagcccaaatatcttaaaagtgaggctcactattgacagcaagaaatagaactaaaataatatctgagtataagattatcttagaaattttaataaacacctggctatgagttactaagcaatgttttgctttctgaagaattaattttctgcatttttttacacttaggaggaatgttattgaagccgtttacaatagactgaatccttacaaaaatgacgacactgtaagtagcattttagctccctctgctttcccttcccctccactctaaatgcatatccttcctacctgtttttgcagagctgttcactgtacccattctcttacacacacccctgattgattgctctgaactctgcttgctctgatctctgcctgcaccacagttctagtgattgaggacataatcatggtgagtggccacctctctcaaaaaagaagaaagtccttttgaattattctagattttttaagtctttacaaacaatcaacttcagaaggtttgcctccactacatggttttttttttttttttttcccgaagttgggactatctctactcagaatattgtcttattctgagttttgtaagcagctgcagcagaacttcggaatgtctgtctcaactaaatagttcttatggttggaaatacctttgtcaggaatcctgaagtatatacttcacttaaatattagagaattgtttgcataaatagacattagaatgccatactctccagttaagtgttctgttgcaattctgttgtatgatgtttatagaaaagtgataacttaaagatcatgtgggcacagctctgaaatattttatgtattgcattatgaagcttcctcacatattgagttcttaatcttttctgatgcattaaaggtttataaaagtggtattctaaaactgtattggatttcattaaaaaattctttttagtagatttattgattgagtaatacatttggacagcctcatcataaaaccgcatttcaaatattttccaaaacaaaacaaaggattaacaattctttgaacagattaaacattgctatttcatatgtacacatatatacttatatactttaaaaaacatttatattctaaaagtcatctttacagaacattatctttctccattatccagaaagtatggtgtattttggcaccgctaaattttaacgttgttccttattttgcttccttttacaaaggactctacatcaacagatgatatgtggtaaaactgctcatctagccatggagtttaccttcacctccaaaggagagtacagctcaactttgttgaaacttttaacatccatcctcaactttaaggaaggggatatgacatgggtgagaatgattacatcagagaacttcagcagtacaacagctagcccagaactgatttttttttttttttttgtaaatttgagacttatgtaagcgtgatttcaaaccataattcgtgttgtaaatcagactccagcaatttttgttgtatgattttgtttttttgtaaagtgtaattgtccttgtacaaaatgctcatatttaattatgaactgctttaaatcactatcaaagttacaagaaatgtttggcttattgtgtgatgcaacagatatatagccctttcaagtcatgttgtgtttggacttggggttggaacagggagagcagcagccatgtcagctacacgctcaaatgtgcagatgattatggaaaataacctcaaaatcttacaaagctgaacatccaaggagttattgaaaactatcttaaatgttcttggtaggggagttggcattgttgataaagccagtcccttcatttaactgtctttcaggatgttccttcgttgtttccatgagtattgcaggtaataatacagtgtattcataagaatctcaatcttggggctaaatgccttgtttctttgcacctcttttcaagtccttacatttaattactaattgataagcagcagcttcctacatatagtaggaaactgccacatttttgctatcatgattggctgggcctgctgctgttcctagtaagatattctgaattccattttatcaataaagcttgatttaacaaacaagaaacttaatcatgtatgtgtaattcctcttttaccctggccttttaaaacactgtgccgttgtaatgagacgtttctcatagggaaagatgttagtctcttttaattggacaacactgtcactcaaggcatagatgaaactttccttccattagaaagactaaaagatttaattcttggttgtaccttaatctattttttaaataggtttctttcaggctgcttatttttcattaagatgtgtatcagcttggatttgcctactgtttaattaaaatatttattgtcaaagtttgacaatctaacactctatggtaggggtgtgtgtgtgtgtgtttgtgagtgtgtgtttgcctgtgatttttaattggcccatgtctttagaatccaagtggttaagatgtatttgtgatttgaaatatagcatgttgataatatttagctgttggcctttacaaataactttcaaagcttaaggaattgtagatataaaaataacctaatttaatttaggcttaaattcctctgattaagcatgtgaaagtaagttttaaaatctgtcgcattgaaaagattactgttccgtgcccttctgtatttttgtctctttaggttgaatattgtatttatcaccatgtaatcattcagtaggcagattcccactagaaaactgttgaaatgtaagactaaaatacaacattgaatacaaaatcaaaattttgtgtataaaaaccagtatagtccattttgttatatttgttttttccctaacttggaaatatacatatttgtatatatagccttaaaattaatgtaaagttaggggagtagtggggaaagtaatgtgaaatgtctcagatttaagtagttaaataccagcaaaatcttttcattatccctcttattttgtgaggtgattaaatgtaacttaattgtatttaatttatatcttattccagcatgaatgaggaaaaactgaagtactatttatatttagaaattcatatcagttgaaattacagaaccaattccatacttacaataaatacttaatgtctaaatctgtggtagagtgcgaagtatgataatgttctaagttatggctttgcaagcatctaaatgtgcatttaatgaataccagtgcttctagtatagactaattaccagacatactggtactgaaagctaaatccctattataacaaaccagttccttaatattttaagtagactgacaactttagttccagaaattgcaaaactttgaactggactgtgtaatcttttgagatgcaaaacttaagtcacaagtagagtatgtgatggaaagctgtatttcaaaccataacagcatatttagagccttttttttttgagtctttaaacaagagaaaattaaaatattcctgtcaaaattattagtattgaaattaggcttggacacgagagagaaccgtatttgagtgatgtgagaagactaaatcttttccacatgagtcagcactgccatactaataatttttttactataaaaatacaggaaggaagtatacattataacagcagactgtgtgtgttcctgattcctggaggtaatagtggggggaaaccaaccatactttttaaaggcacttttgcacctctattgtgcacttcattcttgtaccacttaaattcttcacccccatcccctttttttgtgctaattagcatctcagggcaatgcctcaaaaatgtttgatgtgttctgttctttggagggaaaaagttcttatgtgatgataatatagtactcaaaatatacttttatcatttaaatgtcttatttgctgctatgaataggaaataacattttgtatagcaggctctgttttaccctaacattaaaaaatttcactgatctttctttcattaacagggtagaatctcctaatttccactttcttgggaatatacttttatagacaatagaagcagttctcaatattagcatatactttaaaaaatcaaagtgataacttaattcagctttggaagtatctcaaacatatttttactttatagtgcattaacttgcttctagagtacttaatgcaactgctctagccacttaattttttatactaatctcaacattaagaaatttggattaagtaataaattagttatgtaattcaagtaatctgaattacagcagtacttttagtgatcattcataggactatatattaacccagctaataactcagtttttttacaaaatgtttcgagtattattggtaaaacactgttctaggctaagcacattgggactgtaaagaaatgagtagatccttggcttcaagtttacatctggacaatttataatctagtgtatgttagtattataactggatcactcatcaaaaaatatatatatatatctattgcccacctgctatctaccaggtacttagctgatcaaggcaggcccctgccctaaagaccttgtttatacttcctttactcacctgaaaactgttctccagtttattttcttctctctaaagttaaagagtaattcagaagaaaattttgcttagcataagaataaaattggactgaagaggcttaagcccattcagtatccttgattgcatttatccaacggcctttattcttcctgctgacagcagtaactcagaggaataggtagtagatttctgaaaattatccagccatggaaatgtaggtggggtttgagtttaaggcatttaaaaatgtaaatatctctagctaaatttatcttaagtagaactctgtgtttttgtaacacactgccagtgttaatatcaaattttagccaaattattactatgtgttttaatattttaaaataatttcactgcccatctttactggacaaactcatttggagttcaacttgtgatttctgaaagaactgatgaaattgggtactgctttttttctccatttttcgttttgttttaattttgaatttcatggtatatacttttagttcaaactcagctgtttgtacagtattgtattaggatttggtattagaaaagatgtgtaaatatcttagtatataattgtttctcatttgaggtttttcttctaagggaccttaaagagttttatatacttttgctcacagaaactgctggtgagattaccattttttgagtatctagtcttctagtttttcttttaggcattaggaagccttctttagagttcaaaattttagaagcctaatttgctcttacttccttcaattatgtgccatgtgttttggtttgtatatgttttaaattgtatatttccttggaatatgcttgaaatatttaagaatacattttcaaaatgtataatactgtattgttttgttgatcagaataataagtctcagttaaatgtttgttattactgatagtcaaaatgctcaatagaaatgatgagaggcattggttccaattcattgtcaaatgaacgttttctaattttgttcacagattctttccctttcgattgttctgtatgttaagatagtggcttctgctctcactgttttcctatttatattactagcaggtaggagtgctaattagaaaaacttagatggtattgaaattacagttgacaacttatatttttatgagatggagaaaaaagattaagttgatataacaacaaagtggactttttttcttccttatcctgcacgaaatattgcccttgtttcctctactttcctcttggtgttttctctttttttcaaacagaaacaggccaattccattttcttgagcaagaaagcttagtgtgttacttcatcaaggccagctaatactgtgttaaaccgggctgaaaatgagaaaacttgggagatggaggaatggggaaatggcagtgggataggtagggaaggattactcttaattgttttaaaagccataggaaagtcttccttgtacgtggctgtaaatttataagaactattgtgtcacataaaccaacaagaatgaacctttgctgcttcagataatttgatttttccagcaaggaaattaataagttactgattcttcagcatagaaacaactgagaagaattaatgcaatgtttcttcactagaaaacccaacccttcatttcttttcattgctccaaaacccagttttcaactaatggttttctcattaaactaaatgtttagaaaagttgtttagagtttttctttttcttttacatagtcctcctgatccagtataagactatttagtaacgtgcatttgtatggtactatctaaagtaagttagattgatgtaagagatcgggtagctgcggaacaaaattagttatatcctaattaggtacagtgaatgacacaaaatcattttagcaatgcttcttaaccttttggggtcacaggcgttttgagactgatgaatcctagggacttatttacccaggaaaatgcgtatataacatacatatctccctaaagtttacaatattgtagtggttcatgggccccctggttaagagcccattctaaagtacaatagggcatcatcccttttcctgcaaagcccaaaagtatatttctagggcatgaaaataacttgagtctattttaaggaattgtttcactctagaggtagataggggacctggctagaatctgacattaaaatatactttttaaaaaatattatatttggggtggggaaagtgattaaaaggtgaaaaaaaaacatagtattcagaagttttggaggttaatgtctttctctaagatttgccactttagaaattcaacagaaaagaggtaaaacagaaatggaatgtatctggaacatttttggcctccatagtgcagatatactatattaacaagtaatacatttatttacctgtcagatctccaggttttaagattttgagctttctagtattaggattcattaaatgttcaattcatttcatattctaaggaattaggttatttacttactaattcaggatgttaaaataacatccaagtcggacaaccaccaccaatgcacacagttaatgagatttctaaaatataataagtacaatgtaacaaacgtatagaattttgcatttgttgccaaaattagatgtttaatgacagcttatttaattcccatttgtgggacttctggaacatagaaaccattatcttacctggttatcccttgactaaatagcatatctgcaggaaaatatcttgtttgtagtgatatgccccaatagtgattgatttcactcttgaaatgagttatatcacttaatttgtataaatgttatgagtggagagacatgtacatgttaaaagcatgttgcattatatattcattttttaaactctataaatgttaagaataatataattgcagaaatatttttcttaaatacaatgtgtaacaaaattctccgtagcaactcacccactttgcagtttatgtgatccacacttttaaagaaattccataaatgtatattttgtattatgtattatttcctggtccaaagaaaatatgtgaattcagttctaactttaagaatgtactgtttgttttcaagttcattgaaaaattgcattcagcctgcgaatggttgcagattgtatgttagatgaaaagtagaaataatttctagtttggaaaactggtgccactaaataaacaggcaattacataatgtgtgtgtatttatgattgtttaatattgcaagcagcatttttattccaagaaacgtggagaatttgaaattagctgttggaagaccttaaaagaattgtttttttcagctgagaaataaatctgataggatttgaactagatttgttccttcctaattttaggaagtttactgaaagccaagaagtttgagttgatggttattgtcatgaaacattccagaaataaagaagccagagtagtttctctttggtaagaacattcccatttgtctgtcttctagtagatgattactcccttgaagagttgaaattgggaattgggagtggtctgggaaaggacttcctcacctggtatctgtggtatagtgcctgcttcaaaatggcacttaaatgtgtgtgtttctaggatgcagaaaggaggtgtttatttcctctgccaattctgatcattggctatattatatcctgtgttcattcatgtctgaaagtgacttaaacaggtttaattgattctagtcatggcttccataattagagaatttttagagttgaactgttaataaaagtgaaattctgtgagccgcaagagctcattttgtttattgtaaaatgtgtaataaaacagtaatgaagcttcataaccaaaggtaaaatatcttagaactgagtaaggtaaagtaaggcaaataaggttttattttatttatatgtaagtggaacctcttcactcatcaaattgtatcatgcagttttgttcatgggtttttttgggtttgggttccccctccaccccgctttggagcttttcttttgaatgttgaagctactttaagttgttttatttcttttttcttaatttattactgagaaacttacattggagtgcccttctctttttccttttttatcaattaatagttcaaattaaatttcccatcacttaatagctcagattaaacttctcatcaagtcaaattttattctagttgaaaagtgctatattttttgataaattaccctgggaaattggtttgcatgccctctatagaactttgcttacttgccacaaaaccaacaacttaccagatgttggtaaaagattttgctctgatggctgcctgttgtttacatgagcattatatgtatttcttctgatatgctatctaaggtgattcagagtgcctaaatagtgaattagctaaacattcaacatgtttctgtgatagtttagatacaggcttgtgtcttccagaccaaagcacttctctatagctgtacaaaagtttttctggaaatcaatttgaactagcaaaatttacaatatttagatttttgatctacaaaaatggcagttttatctagcttaatttgtttctgaaattagttgttattcttgaatgatcagattgcaagtcagtatttggtatttctctcattatttatattttaagtcttttaagaactggatgagaggtttaaagaaaagctatacatatttggacaaatttccaaatgtgaggctggataatatacaaatgtatacagatgctctagcattaggtcaacatcagtatgagaaatgttattccagcagtgactgggaaaggaaaggatgccgaatttaagtgttcagggaggaatataatagagactaaagatgggggaaatgattttaaggatttattttgaattacataattgaggtgagtagagagctcctttctaatattttattgggatgttgacgtggatccaatttagtctgtgacttagagacatcagtgagtaattctctgaaaacaattgttctttaaagtgcagtctttgttaaaggtggctgagggctctaactttgttctaggtgtcaactcaaactctgacttaggctacggccatgctgcaccttttctaaatatattttttgtattttattttactatttgtgtctgccttggtaacagctaaaaattacctagtattttaaaggcaaagcatttg

SEQ ID NO: 2 - DNA, 20 bp, Artificial Sequence
  Description of Artificial Sequence: Synthetic oligonucleotide
atgtcttgatcctctaggtc

SEQ ID NO: 3 - DNA, 20 bp, Artificial Sequence
  Description of Artificial Sequence: Synthetic oligonucleotide
tatgtcttgatcctctaggt

SEQ ID NO: 4 - DNA, 20 bp, Artificial Sequence
  Description of Artificial Sequence: Synthetic oligonucleotide
ttatgtcttgatcctctagg

SEQ ID NO: 5 - DNA, 20 bp, Artificial Sequence
  Description of Artificial Sequence: Synthetic oligonucleotide
attatgtcttgatcctctag

SEQ ID NO: 6 - DNA, 20 bp, Artificial Sequence
  Description of Artificial Sequence: Synthetic oligonucleotide
cattatgtcttgatcctcta

SEQ ID NO: 7 - DNA, 20 bp, Artificial Sequence
  Description of Artificial Sequence: Synthetic oligonucleotide
ccattatgtcttgatcctct

SEQ ID NO: 8 - DNA, 20 bp, Artificial Sequence
  Description of Artificial Sequence: Synthetic oligonucleotide
cccattatgtcttgatcctc

SEQ ID NO: 9 - DNA, 20 bp, Artificial Sequence
  Description of Artificial Sequence: Synthetic oligonucleotide
tcccattatgtcttgatcct

SEQ ID NO: 10 - DNA, 20 bp, Artificial Sequence
  Description of Artificial Sequence: Synthetic oligonucleotide
ctcccattatgtcttgatcc

SEQ ID NO: 11 - DNA, 20 bp, Artificial Sequence
  Description of Artificial Sequence: Synthetic oligonucleotide
gctcccattatgtcttgatc

SEQ ID NO: 12 - DNA, 20 bp, Artificial Sequence
  Description of Artificial Sequence: Synthetic oligonucleotide
tgctcccattatgtcttgat

SEQ ID NO: 13 - DNA, 20 bp, Artificial Sequence
  Description of Artificial Sequence: Synthetic oligonucleotide
atgctcccattatgtcttga

SEQ ID NO: 14 - DNA, 20 bp, Artificial Sequence
  Description of Artificial Sequence: Synthetic oligonucleotide
aatgctcccattatgtcttg

SEQ ID NO: 15 - DNA, 20 bp, Artificial Sequence
  Description of Artificial Sequence: Synthetic oligonucleotide
aaatgctcccattatgtctt

SEQ ID NO: 16 - DNA, 20 bp, Artificial Sequence
  Description of Artificial Sequence: Synthetic oligonucleotide
aaaatgctcccattatgtct

SEQ ID NO: 17 - DNA, 20 bp, Artificial Sequence
  Description of Artificial Sequence: Synthetic oligonucleotide
aaaaatgctcccattatgtc

SEQ ID NO: 18 - DNA, 20 bp, Artificial Sequence
  Description of Artificial Sequence: Synthetic oligonucleotide
taaaaatgctcccattatgt

SEQ ID NO: 19 - DNA, 20 bp, Artificial Sequence
  Description of Artificial Sequence: Synthetic oligonucleotide
ctaaaaatgctcccattatg

SEQ ID NO: 20 - DNA, 20 bp, Artificial Sequence
  Description of Artificial Sequence: Synthetic oligonucleotide
tctaaaaatgctcccattat

SEQ ID NO: 21 - DNA, 20 bp, Artificial Sequence
  Description of Artificial Sequence: Synthetic oligonucleotide
gtctaaaaatgctcccatta

SEQ ID NO: 22 - DNA, 20 bp, Artificial Sequence
  Description of Artificial Sequence: Synthetic oligonucleotide
tgtctaaaaatgctcccatt

SEQ ID NO: 23 - DNA, 20 bp, Artificial Sequence
  Description of Artificial Sequence: Synthetic oligonucleotide
ttgtctaaaaatgctcccat

SEQ ID NO: 24 - DNA, 20 bp, Artificial Sequence
  Description of Artificial Sequence: Synthetic oligonucleotide
cttgtctaaaaatgctccca

SEQ ID NO: 25 - DNA, 20 bp, Artificial Sequence
  Description of Artificial Sequence: Synthetic oligonucleotide
gcttgtctaaaaatgctccc

SEQ ID NO: 26 - DNA, 20 bp, Artificial Sequence
  Description of Artificial Sequence: Synthetic oligonucleotide
ggcttgtctaaaaatgctcc

SEQ ID NO: 27 - DNA, 20 bp, Artificial Sequence
  Description of Artificial Sequence: Synthetic oligonucleotide
tggcttgtctaaaaatgctc

SEQ ID NO: 28 - DNA, 20 bp, Artificial Sequence
  Description of Artificial Sequence: Synthetic oligonucleotide
ttggcttgtctaaaaatgct

SEQ ID NO: 29 - DNA, 20 bp, Artificial Sequence
  Description of Artificial Sequence: Synthetic oligonucleotide
tttggcttgtctaaaaatgc

SEQ ID NO: 30 - DNA, 20 bp, Artificial Sequence
  Description of Artificial Sequence: Synthetic oligonucleotide
ctttggcttgtctaaaaatg

SEQ ID NO: 31 - DNA, 20 bp, Artificial Sequence
  Description of Artificial Sequence: Synthetic oligonucleotide
tctttggcttgtctaaaaat

SEQ ID NO: 32 - DNA, 20 bp, Artificial Sequence
  Description of Artificial Sequence: Synthetic oligonucleotide
atctttggcttgtctaaaaa

SEQ ID NO: 33 - DNA, 20 bp, Artificial Sequence
  Description of Artificial Sequence: Synthetic oligonucleotide
catctttggcttgtctaaaa

SEQ ID NO: 34 - DNA, 20 bp, Artificial Sequence
  Description of Artificial Sequence: Synthetic oligonucleotide
ccatctttggcttgtctaaa

SEQ ID NO: 35 - DNA, 20 bp, Artificial Sequence
  Description of Artificial Sequence: Synthetic oligonucleotide
tccatctttggcttgtctaa

SEQ ID NO: 36 - DNA, 20 bp, Artificial Sequence
  Description of Artificial Sequence: Synthetic oligonucleotide
ttccatctttggcttgtcta

SEQ ID NO: 37 - DNA, 20 bp, Artificial Sequence
  Description of Artificial Sequence: Synthetic oligonucleotide
tttccatctttggcttgtct

SEQ ID NO: 38 - DNA, 20 bp, Artificial Sequence
  Description of Artificial Sequence: Synthetic oligonucleotide
ttttccatctttggcttgtc

SEQ ID NO: 39 - DNA, 20 bp, Artificial Sequence
  Description of Artificial Sequence: Synthetic oligonucleotide
cttttccatctttggcttgt

SEQ ID NO: 40 - DNA, 20 bp, Artificial Sequence
  Description of Artificial Sequence: Synthetic oligonucleotide
gcttttccatctttggcttg

SEQ ID NO: 41 - DNA, 20 bp, Artificial Sequence
  Description of Artificial Sequence: Synthetic oligonucleotide
tgcttttccatctttggctt

SEQ ID NO: 42 - DNA, 20 bp, Artificial Sequence
  Description of Artificial Sequence: Synthetic oligonucleotide
atgcttttccatctttggct

SEQ ID NO: 43 - DNA, 20 bp, Artificial Sequence
  Description of Artificial Sequence: Synthetic oligonucleotide
tatgcttttccatctttggc

SEQ ID NO: 44 - DNA, 20 bp, Artificial Sequence
  Description of Artificial Sequence: Synthetic oligonucleotide
ttatgcttttccatctttgg

SEQ ID NO: 45 - DNA, 20 bp, Artificial Sequence
  Description of Artificial Sequence: Synthetic oligonucleotide
attatgcttttccatctttg

SEQ ID NO: 46 - DNA, 20 bp, Artificial Sequence
  Description of Artificial Sequence: Synthetic oligonucleotide
cattatgcttttccatcttt

SEQ ID NO: 47 - DNA, 20 bp, Artificial Sequence
  Description of Artificial Sequence: Synthetic oligonucleotide
gcattatgcttttccatctt

SEQ ID NO: 48 - DNA, 20 bp, Artificial Sequence
  Description of Artificial Sequence: Synthetic oligonucleotide
ggcattatgcttttccatct

SEQ ID NO: 49 - DNA, 20 bp, Artificial Sequence
  Description of Artificial Sequence: Synthetic oligonucleotide
gggcattatgcttttccatc

SEQ ID NO: 50 - DNA, 20 bp, Artificial Sequence
  Description of Artificial Sequence: Synthetic oligonucleotide
tgggcattatgcttttccat

SEQ ID NO: 51 - DNA, 20 bp, Artificial Sequence
  Description of Artificial Sequence: Synthetic oligonucleotide
ctgggcattatgcttttcca

SEQ ID NO: 52 - DNA, 20 bp, Artificial Sequence
  Description of Artificial Sequence: Synthetic oligonucleotide
cctgggcattatgcttttcc

SEQ ID NO: 53 - DNA, 20 bp, Artificial Sequence
  Description of Artificial Sequence: Synthetic oligonucleotide
ccctgggcattatgcttttc

SEQ ID NO: 54 - DNA, 20 bp, Artificial Sequence
  Description of Artificial Sequence: Synthetic oligonucleotide
cccctgggcattatgctttt

SEQ ID NO: 55 - DNA, 20 bp, Artificial Sequence
  Description of Artificial Sequence: Synthetic oligonucleotide
gcccctgggcattatgcttt

SEQ ID NO: 56 - DNA, 20 bp, Artificial Sequence
  Description of Artificial Sequence: Synthetic oligonucleotide
tgcccctgggcattatgctt

SEQ ID NO: 57 - DNA, 20 bp, Artificial Sequence
  Description of Artificial Sequence: Synthetic oligonucleotide
ctgcccctgggcattatgct

SEQ ID NO: 58 - DNA, 20 bp, Artificial Sequence
  Description of Artificial Sequence: Synthetic oligonucleotide
cctgcccctgggcattatgc

SEQ ID NO: 59 - DNA, 20 bp, Artificial Sequence
  Description of Artificial Sequence: Synthetic oligonucleotide
ccctgcccctgggcattatg

SEQ ID NO: 60 - DNA, 20 bp, Artificial Sequence
  Description of Artificial Sequence: Synthetic oligonucleotide
accctgcccctgggcattat

SEQ ID NO: 61 - DNA, 20 bp, Artificial Sequence
  Description of Artificial Sequence: Synthetic oligonucleotide
taccctgcccctgggcatta

SEQ ID NO: 62 - DNA, 20 bp, Artificial Sequence
  Description of Artificial Sequence: Synthetic oligonucleotide
ttaccctgcccctgggcatt

SEQ ID NO: 63 - DNA, 20 bp, Artificial Sequence
  Description of Artificial Sequence: Synthetic oligonucleotide
attaccctgcccctgggcat

SEQ ID NO: 64 - DNA, 20 bp, Artificial Sequence
  Description of Artificial Sequence: Synthetic oligonucleotide
cattaccctgcccctgggca

SEQ ID NO: 65 - DNA, 20 bp, Artificial Sequence
  Description of Artificial Sequence: Synthetic oligonucleotide
ccattaccctgcccctgggc

SEQ ID NO: 66 - DNA, 20 bp, Artificial Sequence
  Description of Artificial Sequence: Synthetic oligonucleotide
cccattaccctgcccctggg

SEQ ID NO: 67 - DNA, 20 bp, Artificial Sequence
  Description of Artificial Sequence: Synthetic oligonucleotide
acccattaccctgcccctgg

SEQ ID NO: 68 - DNA, 20 bp, Artificial Sequence
  Description of Artificial Sequence: Synthetic oligonucleotide
aacccattaccctgcccctg

SEQ ID NO: 69 - DNA, 20 bp, Artificial Sequence
  Description of Artificial Sequence: Synthetic oligonucleotide
caacccattaccctgcccct

SEQ ID NO: 70 - DNA, 20 bp, Artificial Sequence
  Description of Artificial Sequence: Synthetic oligonucleotide
gcaacccattaccctgcccc

SEQ ID NO: 71 - DNA, 20 bp, Artificial Sequence
  Description of Artificial Sequence: Synthetic oligonucleotide
cgcaacccattaccctgccc

SEQ ID NO: 72 - DNA, 20 bp, Artificial Sequence
  Description of Artificial Sequence: Synthetic oligonucleotide
tcgcaacccattaccctgcc

SEQ ID NO: 73 - DNA, 20 bp, Artificial Sequence
  Description of Artificial Sequence: Synthetic oligonucleotide
atcgcaacccattaccctgc

SEQ ID NO: 74 - DNA, 20 bp, Artificial Sequence
  Description of Artificial Sequence: Synthetic oligonucleotide
tatcgcaacccattaccctg

SEQ ID NO: 75 - DNA, 20 bp, Artificial Sequence
  Description of Artificial Sequence: Synthetic oligonucleotide
atatcgcaacccattaccct

SEQ ID NO: 76 - DNA, 20 bp, Artificial Sequence
  Description of Artificial Sequence: Synthetic oligonucleotide
catatcgcaacccattaccc

SEQ ID NO: 77 - DNA, 20 bp, Artificial Sequence
  Description of Artificial Sequence: Synthetic oligonucleotide
ccatatcgcaacccattacc

SEQ ID NO: 78 - DNA, 20 bp, Artificial Sequence
  Description of Artificial Sequence: Synthetic oligonucleotide
cccatatcgcaacccattac

SEQ ID NO: 79 - DNA, 20 bp, Artificial Sequence
  Description of Artificial Sequence: Synthetic oligonucleotide
gcccatatcgcaacccatta

SEQ ID NO: 80 - DNA, 20 bp, Artificial Sequence
  Description of Artificial Sequence: Synthetic oligonucleotide
agcccatatcgcaacccatt

SEQ ID NO: 81 - DNA, 20 bp, Artificial Sequence
  Description of Artificial Sequence: Synthetic oligonucleotide
tagcccatatcgcaacccat

SEQ ID NO: 82 - DNA, 20 bp, Artificial Sequence
  Description of Artificial Sequence: Synthetic oligonucleotide
ttagcccatatcgcaaccca

SEQ ID NO: 83 - DNA, 20 bp, Artificial Sequence
  Description of Artificial Sequence: Synthetic oligonucleotide
cttagcccatatcgcaaccc

SEQ ID NO: 84 - DNA, 20 bp, Artificial Sequence
  Description of Artificial Sequence: Synthetic oligonucleotide
gcttagcccatatcgcaacc

SEQ ID NO: 85 - DNA, 20 bp, Artificial Sequence
  Description of Artificial Sequence: Synthetic oligonucleotide
tgcttagcccatatcgcaac

SEQ ID NO: 86 - DNA, 20 bp, Artificial Sequence
  Description of Artificial Sequence: Synthetic oligonucleotide
ctgcttagcccatatcgcaa

SEQ ID NO: 87 - DNA, 20 bp, Artificial Sequence
  Description of Artificial Sequence: Synthetic oligonucleotide
gctgcttagcccatatcgca

SEQ ID NO: 88 - DNA, 20 bp, Artificial Sequence
  Description of Artificial Sequence: Synthetic oligonucleotide
tgctgcttagcccatatcgc

SEQ ID NO: 89 - DNA, 20 bp, Artificial Sequence
  Description of Artificial Sequence: Synthetic oligonucleotide
atgctgcttagcccatatcg

SEQ ID NO: 90 - DNA, 20 bp, Artificial Sequence
  Description of Artificial Sequence: Synthetic oligonucleotide
catgctgcttagcccatatc

SEQ ID NO: 91 - DNA, 20 bp, Artificial Sequence
  Description of Artificial Sequence: Synthetic oligonucleotide
gcatgctgcttagcccatat

SEQ ID NO: 92 - DNA, 20 bp, Artificial Sequence
  Description of Artificial Sequence: Synthetic oligonucleotide
tgcatgctgcttagcccata

SEQ ID NO: 93 - DNA, 20 bp, Artificial Sequence
  Description of Artificial Sequence: Synthetic oligonucleotide
ttgcatgctgcttagcccat

SEQ ID NO: 94 - DNA, 20 bp, Artificial Sequence
  Description of Artificial Sequence: Synthetic oligonucleotide
cttgcatgctgcttagccca

SEQ ID NO: 95 - DNA, 20 bp, Artificial Sequence
  Description of Artificial Sequence: Synthetic oligonucleotide
ccttgcatgctgcttagccc

SEQ ID NO: 96 - DNA, 20 bp, Artificial Sequence
  Description of Artificial Sequence: Synthetic oligonucleotide
gccttgcatgctgcttagcc

SEQ ID NO: 97 - DNA, 20 bp, Artificial Sequence
  Description of Artificial Sequence: Synthetic oligonucleotide
agccttgcatgctgcttagc

SEQ ID NO: 98 - DNA, 20 bp, Artificial Sequence
  Description of Artificial Sequence: Synthetic oligonucleotide
cagccttgcatgctgcttag

SEQ ID NO: 99 - DNA, 20 bp, Artificial Sequence
  Description of Artificial Sequence: Synthetic oligonucleotide
ccagccttgcatgctgctta

SEQ ID NO: 100 - DNA, 20 bp, Artificial Sequence
  Description of Artificial Sequence: Synthetic oligonucleotide
gccagccttgcatgctgctt

SEQ ID NO: 101 - DNA, 20 bp, Artificial Sequence
  Description of Artificial Sequence: Synthetic oligonucleotide
cgccagccttgcatgctgct

SEQ ID NO: 102 - DNA, 20 bp, Artificial Sequence
  Description of Artificial Sequence: Synthetic oligonucleotide
acgccagccttgcatgctgc

SEQ ID NO: 103 - DNA, 20 bp, Artificial Sequence
  Description of Artificial Sequence: Synthetic oligonucleotide
cacgccagccttgcatgctg

SEQ ID NO: 104 - DNA, 20 bp, Artificial Sequence
  Description of Artificial Sequence: Synthetic oligonucleotide
acacgccagccttgcatgct

SEQ ID NO: 105 - DNA, 20 bp, Artificial Sequence
  Description of Artificial Sequence: Synthetic oligonucleotide
aacacgccagccttgcatgc

SEQ ID NO: 106 - DNA, 20 bp, Artificial Sequence
  Description of Artificial Sequence: Synthetic oligonucleotide
caacacgccagccttgcatg

SEQ ID NO: 107 - DNA, 20 bp, Artificial Sequence
  Description of Artificial Sequence: Synthetic oligonucleotide
tcaacacgccagccttgcat

SEQ ID NO: 108 - DNA, 20 bp, Artificial Sequence
  Description of Artificial Sequence: Synthetic oligonucleotide
ttcaacacgccagccttgca

SEQ ID NO: 109 - DNA, 20 bp, Artificial Sequence
  Description of Artificial Sequence: Synthetic oligonucleotide
tttcaacacgccagccttgc

SEQ ID NO: 110 - DNA, 20 bp, Artificial Sequence
  Description of Artificial Sequence: Synthetic oligonucleotide
atttcaacacgccagccttg

SEQ ID NO: 111 - DNA, 20 bp, Artificial Sequence
  Description of Artificial Sequence: Synthetic oligonucleotide
catttcaacacgccagcctt

SEQ ID NO: 112 - DNA, 20 bp, Artificial Sequence
  Description of Artificial Sequence: Synthetic oligonucleotide
ccatttcaacacgccagcct

SEQ ID NO: 113 - DNA, 20 bp, Artificial Sequence
  Description of Artificial Sequence: Synthetic oligonucleotide
tccatttcaacacgccagcc

SEQ ID NO: 114 - DNA, 20 bp, Artificial Sequence
  Description of Artificial Sequence: Synthetic oligonucleotide
ctccatttcaacacgccagc

SEQ ID NO: 115 - DNA, 20 bp, Artificial Sequence
  Description of Artificial Sequence: Synthetic oligonucleotide
cctccatttcaacacgccag

SEQ ID NO: 116 - DNA, 20 bp, Artificial Sequence
  Description of Artificial Sequence: Synthetic oligonucleotide
tcctccatttcaacacgcca

SEQ ID NO: 117 - DNA, 20 bp, Artificial Sequence
  Description of Artificial Sequence: Synthetic oligonucleotide
atcctccatttcaacacgcc

SEQ ID NO: 118 - DNA, 20 bp, Artificial Sequence
  Description of Artificial Sequence: Synthetic oligonucleotide
catcctccatttcaacacgc

SEQ ID NO: 119 - DNA, 20 bp, Artificial Sequence
  Description of Artificial Sequence: Synthetic oligonucleotide
gcatcctccatttcaacacg

SEQ ID NO: 120 - DNA, 20 bp, Artificial Sequence
  Description of Artificial Sequence: Synthetic oligonucleotide
tgcatcctccatttcaacac

SEQ ID NO: 121 - DNA, 20 bp, Artificial Sequence
  Description of Artificial Sequence: Synthetic oligonucleotide
gtgcatcctccatttcaaca

SEQ ID NO: 122 - DNA, 20 bp, Artificial Sequence
  Description of Artificial Sequence: Synthetic oligonucleotide
tgtgcatcctccatttcaac

SEQ ID NO: 123 - DNA, 20 bp, Artificial Sequence
  Description of Artificial Sequence: Synthetic oligonucleotide
atgtgcatcctccatttcaa

SEQ ID NO: 124 - DNA, 20 bp, Artificial Sequence
  Description of Artificial Sequence: Synthetic oligonucleotide
tatgtgcatcctccatttca

SEQ ID NO: 125 - DNA, 20 bp, Artificial Sequence
  Description of Artificial Sequence: Synthetic oligonucleotide
gtatgtgcatcctccatttc

SEQ ID NO: 126 - DNA, 20 bp, Artificial Sequence
  Description of Artificial Sequence: Synthetic oligonucleotide
cgtatgtgcatcctccattt

SEQ ID NO: 127 - DNA, 20 bp, Artificial Sequence
  Description of Artificial Sequence: Synthetic oligonucleotide
ccgtatgtgcatcctccatt

SEQ ID NO: 128 - DNA, 20 bp, Artificial Sequence
  Description of Artificial Sequence: Synthetic oligonucleotide
gccgtatgtgcatcctccat

SEQ ID NO: 129 - DNA, 20 bp, Artificial Sequence
  Description of Artificial Sequence: Synthetic oligonucleotide
agccgtatgtgcatcctcca

SEQ ID NO: 130 - DNA, 20 bp, Artificial Sequence
  Description of Artificial Sequence: Synthetic oligonucleotide
cagccgtatgtgcatcctcc

SEQ ID NO: 131 - DNA, 20 bp, Artificial Sequence
  Description of Artificial Sequence: Synthetic oligonucleotide
acagccgtatgtgcatcctc

SEQ ID NO: 132 - DNA, 20 bp, Artificial Sequence
  Description of Artificial Sequence: Synthetic oligonucleotide
cacagccgtatgtgcatcct

SEQ ID NO: 133 - DNA, 20 bp, Artificial Sequence
  Description of Artificial Sequence: Synthetic oligonucleotide
tcacagccgtatgtgcatcc

SEQ ID NO: 134 - DNA, 20 bp, Artificial Sequence
  Description of Artificial Sequence: Synthetic oligonucleotide
atcacagccgtatgtgcatc

SEQ ID NO: 135 - DNA, 20 bp, Artificial Sequence
  Description of Artificial Sequence: Synthetic oligonucleotide
gatcacagccgtatgtgcat

SEQ ID NO: 136 - DNA, 20 bp, Artificial Sequence
  Description of Artificial Sequence: Synthetic oligonucleotide
cgatcacagccgtatgtgca

SEQ ID NO: 137 - DNA, 20 bp, Artificial Sequence
  Description of Artificial Sequence: Synthetic oligonucleotide
ccgatcacagccgtatgtgc

SEQ ID NO: 138 - DNA, 20 bp, Artificial Sequence
  Description of Artificial Sequence: Synthetic oligonucleotide
accgatcacagccgtatgtg

SEQ ID NO: 139 - DNA, 20 bp, Artificial Sequence
  Description of Artificial Sequence: Synthetic oligonucleotide
aaccgatcacagccgtatgt

SEQ ID NO: 140 - DNA, 20 bp, Artificial Sequence
  Description of Artificial Sequence: Synthetic oligonucleotide
aaaccgatcacagccgtatg

SEQ ID NO: 141 - DNA, 20 bp, Artificial Sequence
  Description of Artificial Sequence: Synthetic oligonucleotide
caaaccgatcacagccgtat

SEQ ID NO: 142 - DNA, 20 bp, Artificial Sequence
  Description of Artificial Sequence: Synthetic oligonucleotide
gcaaaccgatcacagccgta

SEQ ID NO: 143 - DNA, 20 bp, Artificial Sequence
  Description of Artificial Sequence: Synthetic oligonucleotide
ggcaaaccgatcacagccgt

SEQ ID NO: 144 - DNA, 20 bp, Artificial Sequence
  Description of Artificial Sequence: Synthetic oligonucleotide
tggcaaaccgatcacagccg

SEQ ID NO: 145 - DNA, 20 bp, Artificial Sequence
  Description of Artificial Sequence: Synthetic oligonucleotide
ttggcaaaccgatcacagcc

SEQ ID NO: 146 - DNA, 20 bp, Artificial Sequence
  Description of Artificial Sequence: Synthetic oligonucleotide
cttggcaaaccgatcacagc

SEQ ID NO: 147 - DNA, 20 bp, Artificial Sequence
  Description of Artificial Sequence: Synthetic oligonucleotide
acttggcaaaccgatcacag

SEQ ID NO: 148 - DNA, 20 bp, Artificial Sequence
  Description of Artificial Sequence: Synthetic oligonucleotide
cacttggcaaaccgatcaca

SEQ ID NO: 149 - DNA, 20 bp, Artificial Sequence
  Description of Artificial Sequence: Synthetic oligonucleotide
ccacttggcaaaccgatcac

SEQ ID NO: 150 - DNA, 20 bp, Artificial Sequence
  Description of Artificial Sequence: Synthetic oligonucleotide
tccacttggcaaaccgatca

SEQ ID NO: 151 - DNA, 20 bp, Artificial Sequence
  Description of Artificial Sequence: Synthetic oligonucleotide
gtccacttggcaaaccgatc

SEQ ID NO: 152 - DNA, 20 bp, Artificial Sequence
  Description of Artificial Sequence: Synthetic oligonucleotide
agtccacttggcaaaccgat

SEQ ID NO: 153 - DNA, 20 bp, Artificial Sequence
  Description of Artificial Sequence: Synthetic oligonucleotide
aagtccacttggcaaaccga

SEQ ID NO: 154 - DNA, 20 bp, Artificial Sequence
  Description of Artificial Sequence: Synthetic oligonucleotide
caagtccacttggcaaaccg

SEQ ID NO: 155 - DNA, 20 bp, Artificial Sequence
  Description of Artificial Sequence: Synthetic oligonucleotide
tcaagtccacttggcaaacc

SEQ ID NO: 156 - DNA, 20 bp, Artificial Sequence
  Description of Artificial Sequence: Synthetic oligonucleotide
ttcaagtccacttggcaaac

SEQ ID NO: 157 - DNA, 20 bp, Artificial Sequence
  Description of Artificial Sequence: Synthetic oligonucleotide
attcaagtccacttggcaaa

SEQ ID NO: 158 - DNA, 20 bp, Artificial Sequence
  Description of Artificial Sequence: Synthetic oligonucleotide
gattcaagtccacttggcaa

SEQ ID NO: 159 - DNA, 20 bp, Artificial Sequence
  Description of Artificial Sequence: Synthetic oligonucleotide
cgattcaagtccacttggca

SEQ ID NO: 160 - DNA, 20 bp, Artificial Sequence
  Description of Artificial Sequence: Synthetic oligonucleotide
acgattcaagtccacttggc

SEQ ID NO: 161 - DNA, 20 bp, Artificial Sequence
  Description of Artificial Sequence: Synthetic oligonucleotide
cacgattcaagtccacttgg

SEQ ID NO: 162 - DNA, 20 bp, Artificial Sequence
  Description of Artificial Sequence: Synthetic oligonucleotide
ccacgattcaagtccacttg

SEQ ID NO: 163 - DNA, 20 bp, Artificial Sequence
  Description of Artificial Sequence: Synthetic oligonucleotide
accacgattcaagtccactt

SEQ ID NO: 164 - DNA, 20 bp, Artificial Sequence
  Description of Artificial Sequence: Synthetic oligonucleotide
gaccacgattcaagtccact

SEQ ID NO: 165 - DNA, 20 bp, Artificial Sequence
  Description of Artificial Sequence: Synthetic oligonucleotide
tgaccacgattcaagtccac

SEQ ID NO: 166 - DNA, 20 bp, Artificial Sequence
  Description of Artificial Sequence: Synthetic oligonucleotide
atgaccacgattcaagtcca

SEQ ID NO: 167 - DNA, 20 bp, Artificial Sequence
  Description of Artificial Sequence: Synthetic oligonucleotide
aatgaccacgattcaagtcc

SEQ ID NO: 168 - DNA, 20 bp, Artificial Sequence
  Description of Artificial Sequence: Synthetic oligonucleotide
gaatgaccacgattcaagtc

SEQ ID NO: 169 - DNA, 20 bp, Artificial Sequence
  Description of Artificial Sequence: Synthetic oligonucleotide
agaatgaccacgattcaagt

SEQ ID NO: 170 - DNA, 20 bp, Artificial Sequence
  Description of Artificial Sequence: Synthetic oligonucleotide
aagaatgaccacgattcaag

SEQ ID NO: 171 - DNA, 20 bp, Artificial Sequence
  Description of Artificial Sequence: Synthetic oligonucleotide
aaagaatgaccacgattcaa

SEQ ID NO: 172 - DNA, 20 bp, Artificial Sequence
  Description of Artificial Sequence: Synthetic oligonucleotide
caaagaatgaccacgattca

SEQ ID NO: 173 - DNA, 20 bp, Artificial Sequence
  Description of Artificial Sequence: Synthetic oligonucleotide
gcaaagaatgaccacgattc

SEQ ID NO: 174 - DNA, 20 bp, Artificial Sequence
  Description of Artificial Sequence: Synthetic oligonucleotide
agcaaagaatgaccacgatt

SEQ ID NO: 175 - DNA, 20 bp, Artificial Sequence
  Description of Artificial Sequence: Synthetic oligonucleotide
cagcaaagaatgaccacgat

SEQ ID NO: 176 - DNA, 20 bp, Artificial Sequence
  Description of Artificial Sequence: Synthetic oligonucleotide
acagcaaagaatgaccacga

SEQ ID NO: 177 - DNA, 20 bp, Artificial Sequence
  Description of Artificial Sequence: Synthetic oligonucleotide
cacagcaaagaatgaccacg

SEQ ID NO: 178 - DNA, 20 bp, Artificial Sequence
  Description of Artificial Sequence: Synthetic oligonucleotide
acacagcaaagaatgaccac

SEQ ID NO: 179 - DNA, 20 bp, Artificial Sequence
  Description of Artificial Sequence: Synthetic oligonucleotide
tacacagcaaagaatgacca

SEQ ID NO: 180 - DNA, 20 bp, Artificial Sequence
  Description of Artificial Sequence: Synthetic oligonucleotide
atacacagcaaagaatgacc

SEQ ID NO: 181 - DNA, 20 bp, Artificial Sequence
  Description of Artificial Sequence: Synthetic oligonucleotide
catacacagcaaagaatgac

SEQ ID NO: 182 - DNA, 20 bp, Artificial Sequence
  Description of Artificial Sequence: Synthetic oligonucleotide
tcatacacagcaaagaatga

SEQ ID NO: 183 - DNA, 20 bp, Artificial Sequence
  Description of Artificial Sequence: Synthetic oligonucleotide
atcatacacagcaaagaatg

SEQ ID NO: 184 - DNA, 20 bp, Artificial Sequence
  Description of Artificial Sequence: Synthetic oligonucleotide
catcatacacagcaaagaat

SEQ ID NO: 185 - DNA, 20 bp, Artificial Sequence
  Description of Artificial Sequence: Synthetic oligonucleotide
ccatcatacacagcaaagaa

SEQ ID NO: 186 - DNA, 20 bp, Artificial Sequence
  Description of Artificial Sequence: Synthetic oligonucleotide
cccatcatacacagcaaaga

SEQ ID NO: 187 - DNA, 20 bp, Artificial Sequence
  Description of Artificial Sequence: Synthetic oligonucleotide
gcccatcatacacagcaaag

SEQ ID NO: 188 - DNA, 20 bp, Artificial Sequence
  Description of Artificial Sequence: Synthetic oligonucleotide
tgcccatcatacacagcaaa

SEQ ID NO: 189 - DNA, 20 bp, Artificial Sequence
  Description of Artificial Sequence: Synthetic oligonucleotide
atgcccatcatacacagcaa

SEQ ID NO: 190 - DNA, 20 bp, Artificial Sequence
  Description of Artificial Sequence: Synthetic oligonucleotide
catgcccatcatacacagca

SEQ ID NO: 191 - DNA, 20 bp, Artificial Sequence
  Description of Artificial Sequence: Synthetic oligonucleotide
gcatgcccatcatacacagc

SEQ ID NO: 192 - DNA, 20 bp, Artificial Sequence
  Description of Artificial Sequence: Synthetic oligonucleotide
agcatgcccatcatacacag

SEQ ID NO: 193 - DNA, 20 bp, Artificial Sequence
  Description of Artificial Sequence: Synthetic oligonucleotide
cagcatgcccatcatacaca

SEQ ID NO: 194 - DNA, 20 bp, Artificial Sequence
  Description of Artificial Sequence: Synthetic oligonucleotide
ccagcatgcccatcatacac

SEQ ID NO: 195 - DNA, 20 bp, Artificial Sequence
  Description of Artificial Sequence: Synthetic oligonucleotide
accagcatgcccatcataca

SEQ ID NO: 196 - DNA, 20 bp, Artificial Sequence
  Description of Artificial Sequence: Synthetic oligonucleotide
aaccagcatgcccatcatac

SEQ ID NO: 197 - DNA, 20 bp, Artificial Sequence
  Description of Artificial Sequence: Synthetic oligonucleotide
gaaccagcatgcccatcata

SEQ ID NO: 198 - DNA, 20 bp, Artificial Sequence
  Description of Artificial Sequence: Synthetic oligonucleotide
agaaccagcatgcccatcat

SEQ ID NO: 199 - DNA, 20 bp, Artificial Sequence
  Description of Artificial Sequence: Synthetic oligonucleotide
gagaaccagcatgcccatca

SEQ ID NO: 200 - DNA, 20 bp, Artificial Sequence
  Description of Artificial Sequence: Synthetic oligonucleotide
tgagaaccagcatgcccatc

SEQ ID NO: 201 - DNA, 20 bp, Artificial Sequence
  Description of Artificial Sequence: Synthetic oligonucleotide
ctgagaaccagcatgcccat

SEQ ID NO: 202 - DNA, 20 bp, Artificial Sequence
  Description of Artificial Sequence: Synthetic oligonucleotide
cctgagaaccagcatgccca

SEQ ID NO: 203 - DNA, 20 bp, Artificial Sequence
  Description of Artificial Sequence: Synthetic oligonucleotide
acctgagaaccagcatgccc

SEQ ID NO: 204 - DNA, 20 bp, Artificial Sequence
  Description of Artificial Sequence: Synthetic oligonucleotide
aacctgagaaccagcatgcc

SEQ ID NO: 205 - DNA, 20 bp, Artificial Sequence
  Description of Artificial Sequence: Synthetic oligonucleotide
caacctgagaaccagcatgc

SEQ ID NO: 206 - DNA, 20 bp, Artificial Sequence
  Description of Artificial Sequence: Synthetic oligonucleotide
gcaacctgagaaccagcatg

SEQ ID NO: 207 - DNA, 20 bp, Artificial Sequence
  Description of Artificial Sequence: Synthetic oligonucleotide
ggcaacctgagaaccagcat

SEQ ID NO: 208 - DNA, 20 bp, Artificial Sequence
  Description of Artificial Sequence: Synthetic oligonucleotide
tggcaacctgagaaccagca

SEQ ID NO: 209 - DNA, 20 bp, Artificial Sequence
  Description of Artificial Sequence: Synthetic oligonucleotide
ttggcaacctgagaaccagc

SEQ ID NO: 210 - DNA, 20 bp, Artificial Sequence
  Description of Artificial Sequence: Synthetic oligonucleotide
tttggcaacctgagaaccag

SEQ ID NO: 211 - DNA, 20 bp, Artificial Sequence
  Description of Artificial Sequence: Synthetic oligonucleotide
atttggcaacctgagaacca

SEQ ID NO: 212 - DNA, 20 bp, Artificial Sequence
  Description of Artificial Sequence: Synthetic oligonucleotide
tatttggcaacctgagaacc

SEQ ID NO: 213 - DNA, 20 bp, Artificial Sequence
  Description of Artificial Sequence: Synthetic oligonucleotide
gtatttggcaacctgagaac

SEQ ID NO: 214 - DNA, 20 bp, Artificial Sequence
  Description of Artificial Sequence: Synthetic oligonucleotide
agtatttggcaacctgagaa

SEQ ID NO: 215 - DNA, 20 bp, Artificial Sequence
  Description of Artificial Sequence: Synthetic oligonucleotide
cagtatttggcaacctgaga

SEQ ID NO: 216 - DNA, 20 bp, Artificial Sequence
  Description of Artificial Sequence: Synthetic oligonucleotide
gcagtatttggcaacctgag

SEQ ID NO: 217 - DNA, 20 bp, Artificial Sequence
  Description of Artificial Sequence: Synthetic oligonucleotide
agcagtatttggcaacctga

SEQ ID NO: 218 - DNA, 20 bp, Artificial Sequence
  Description of Artificial Sequence: Synthetic oligonucleotide
cagcagtatttggcaacctg

SEQ ID NO: 219 - DNA, 20 bp, Artificial Sequence
  Description of Artificial Sequence: Synthetic oligonucleotide
acagcagtatttggcaacct

SEQ ID NO: 220 - DNA, 20 bp, Artificial Sequence
  Description of Artificial Sequence: Synthetic oligonucleotide
cacagcagtatttggcaacc

SEQ ID NO: 221 - DNA, 20 bp, Artificial Sequence
  Description of Artificial Sequence: Synthetic oligonucleotide
tcacagcagtatttggcaac

SEQ ID NO: 222 - DNA, 20 bp, Artificial Sequence
  Description of Artificial Sequence: Synthetic oligonucleotide
ctcacagcagtatttggcaa

SEQ ID NO: 223 - DNA, 20 bp, Artificial Sequence
  Description of Artificial Sequence: Synthetic oligonucleotide
gctcacagcagtatttggca

SEQ ID NO: 224 - DNA, 20 bp, Artificial Sequence
  Description of Artificial Sequence: Synthetic oligonucleotide
tgctcacagcagtatttggc

SEQ ID NO: 225 - DNA, 20 bp, Artificial Sequence
  Description of Artificial Sequence: Synthetic oligonucleotide
atgctcacagcagtatttgg

SEQ ID NO: 226 - DNA, 20 bp, Artificial Sequence
  Description of Artificial Sequence: Synthetic oligonucleotide
aatgctcacagcagtatttg

SEQ ID NO: 227 - DNA, 20 bp, Artificial Sequence
  Description of Artificial Sequence: Synthetic oligonucleotide
aaatgctcacagcagtattt

SEQ ID NO: 228 - DNA, 20 bp, Artificial Sequence
  Description of Artificial Sequence: Synthetic oligonucleotide
caaatgctcacagcagtatt

SEQ ID NO: 229 - DNA, 20 bp, Artificial Sequence
  Description of Artificial Sequence: Synthetic oligonucleotide
acaaatgctcacagcagtat

SEQ ID NO: 230 - DNA, 20 bp, Artificial Sequence
  Description of Artificial Sequence: Synthetic oligonucleotide
aacaaatgctcacagcagta

SEQ ID NO: 231 - DNA, 20 bp, Artificial Sequence
  Description of Artificial Sequence: Synthetic oligonucleotide
taacaaatgctcacagcagt

SEQ ID NO: 232 - DNA, 20 bp, Artificial Sequence
  Description of Artificial Sequence: Synthetic oligonucleotide
ctaacaaatgctcacagcag

SEQ ID NO: 233 - DNA, 20 bp, Artificial Sequence
  Description of Artificial Sequence: Synthetic oligonucleotide
tctaacaaatgctcacagca

SEQ ID NO: 234 - DNA, 20 bp, Artificial Sequence
  Description of Artificial Sequence: Synthetic oligonucleotide
atctaacaaatgctcacagc

SEQ ID NO: 235 - DNA, 20 bp, Artificial Sequence
  Description of Artificial Sequence: Synthetic oligonucleotide
gatctaacaaatgctcacag

SEQ ID NO: 236 - DNA, 20 bp, Artificial Sequence
  Description of Artificial Sequence: Synthetic oligonucleotide
tgatctaacaaatgctcaca

SEQ ID NO: 237 - DNA, 20 bp, Artificial Sequence
  Description of Artificial Sequence: Synthetic oligonucleotide
gtgatctaacaaatgctcac

SEQ ID NO: 238 - DNA, 20 bp, Artificial Sequence
  Description of Artificial Sequence: Synthetic oligonucleotide
tgtgatctaacaaatgctca

SEQ ID NO: 239 - DNA, 20 bp, Artificial Sequence
  Description of Artificial Sequence: Synthetic oligonucleotide
atgtgatctaacaaatgctc

SEQ ID NO: 240 - DNA, 20 bp, Artificial Sequence
  Description of Artificial Sequence: Synthetic oligonucleotide
gatgtgatctaacaaatgct

SEQ ID NO: 241 - DNA, 20 bp, Artificial Sequence
  Description of Artificial Sequence: Synthetic oligonucleotide
tgatgtgatctaacaaatgc

SEQ ID NO: 242 - DNA, 20 bp, Artificial Sequence
  Description of Artificial Sequence: Synthetic oligonucleotide
gtgatgtgatctaacaaatg

SEQ ID NO: 243 - DNA, 20 bp, Artificial Sequence
  Description of Artificial Sequence: Synthetic oligonucleotide
ggtgatgtgatctaacaaat

SEQ ID NO: 244 - DNA, 20 bp, Artificial Sequence
  Description of Artificial Sequence: Synthetic oligonucleotide
tggtgatgtgatctaacaaa

SEQ ID NO: 245 - DNA, 20 bp, Artificial Sequence
  Description of Artificial Sequence: Synthetic oligonucleotide
ttggtgatgtgatctaacaa

SEQ ID NO: 246 - DNA, 20 bp, Artificial Sequence
  Description of Artificial Sequence: Synthetic oligonucleotide
attggtgatgtgatctaaca

SEQ ID NO: 247 - DNA, 20 bp, Artificial Sequence
  Description of Artificial Sequence: Synthetic oligonucleotide
tattggtgatgtgatctaac

SEQ ID NO: 248 - DNA, 20 bp, Artificial Sequence
  Description of Artificial Sequence: Synthetic oligonucleotide
ttattggtgatgtgatctaa

SEQ ID NO: 249 - DNA, 20 bp, Artificial Sequence
  Description of Artificial Sequence: Synthetic oligonucleotide
gttattggtgatgtgatcta

SEQ ID NO: 250 - DNA, 20 bp, Artificial Sequence
  Description of Artificial Sequence: Synthetic oligonucleotide
ggttattggtgatgtgatct

SEQ ID NO: 251 - DNA, 20 bp, Artificial Sequence
  Description of Artificial Sequence: Synthetic oligonucleotide
tggttattggtgatgtgatc

SEQ ID NO: 252 - DNA, 20 bp, Artificial Sequence
  Description of Artificial Sequence: Synthetic oligonucleotide
ctggttattggtgatgtgat

SEQ ID NO: 253 - DNA, 20 bp, Artificial Sequence
  Description of Artificial Sequence: Synthetic oligonucleotide
cctggttattggtgatgtga

SEQ ID NO: 254 - DNA, 20 bp, Artificial Sequence
  Description of Artificial Sequence: Synthetic oligonucleotide
tcctggttattggtgatgtg

SEQ ID NO: 255 - DNA, 20 bp, Artificial Sequence
  Description of Artificial Sequence: Synthetic oligonucleotide
atcctggttattggtgatgt

SEQ ID NO: 256 - DNA, 20 bp, Artificial Sequence
  Description of Artificial Sequence: Synthetic oligonucleotide
aatcctggttattggtgatg

SEQ ID NO: 257 - DNA, 20 bp, Artificial Sequence
  Description of Artificial Sequence: Synthetic oligonucleotide
aaatcctggttattggtgat

SEQ ID NO: 258 - DNA, 20 bp, Artificial Sequence
  Description of Artificial Sequence: Synthetic oligonucleotide
aaaatcctggttattggtga

SEQ ID NO: 259 - DNA, 20 bp, Artificial Sequence
  Description of Artificial Sequence: Synthetic oligonucleotide
taaaatcctggttattggtg

SEQ ID NO: 260 - DNA, 20 bp, Artificial Sequence
  Description of Artificial Sequence: Synthetic oligonucleotide
ttaaaatcctggttattggt

SEQ ID NO: 261 - DNA, 20 bp, Artificial Sequence
  Description of Artificial Sequence: Synthetic oligonucleotide
tttaaaatcctggttattgg

SEQ ID NO: 262 - DNA, 20 bp, Artificial Sequence
  Description of Artificial Sequence: Synthetic oligonucleotide
ctttaaaatcctggttattg

SEQ ID NO: 263 - DNA, 20 bp, Artificial Sequence
  Description of Artificial Sequence: Synthetic oligonucleotide
cctttaaaatcctggttatt

SEQ ID NO: 264 - DNA, 20 bp, Artificial Sequence
  Description of Artificial Sequence: Synthetic oligonucleotide
ccctttaaaatcctggttat

SEQ ID NO: 265 - DNA, 20 bp, Artificial Sequence
  Description of Artificial Sequence: Synthetic oligonucleotide
accctttaaaatcctggtta

SEQ ID NO: 266 - DNA, 20 bp, Artificial Sequence
  Description of Artificial Sequence: Synthetic oligonucleotide
gaccctttaaaatcctggtt

SEQ ID NO: 267 - DNA, 20 bp, Artificial Sequence
  Description of Artificial Sequence: Synthetic oligonucleotide
agaccctttaaaatcctggt

SEQ ID NO: 268 - DNA, 20 bp, Artificial Sequence
  Description of Artificial Sequence: Synthetic oligonucleotide
cagaccctttaaaatcctgg

SEQ ID NO: 269 - DNA, 20 bp, Artificial Sequence
  Description of Artificial Sequence: Synthetic oligonucleotide
gcagaccctttaaaatcctg

SEQ ID NO: 270 - DNA, 20 bp, Artificial Sequence
  Description of Artificial Sequence: Synthetic oligonucleotide
tgcagaccctttaaaatcct

SEQ ID NO: 271 - DNA, 20 bp, Artificial Sequence
  Description of Artificial Sequence: Synthetic oligonucleotide
ctgcagaccctttaaaatcc

SEQ ID NO: 272 - DNA, 20 bp, Artificial Sequence
  Description of Artificial Sequence: Synthetic oligonucleotide
cctgcagaccctttaaaatc

SEQ ID NO: 273 - DNA, 20 bp, Artificial Sequence
  Description of Artificial Sequence: Synthetic oligonucleotide
tcctgcagaccctttaaaat

SEQ ID NO: 274 - DNA, 20 bp, Artificial Sequence
  Description of Artificial Sequence: Synthetic oligonucleotide
ctcctgcagaccctttaaaa

SEQ ID NO: 275 - DNA, 20 bp, Artificial Sequence
  Description of Artificial Sequence: Synthetic oligonucleotide
gctcctgcagaccctttaaa

SEQ ID NO: 276 - DNA, 20 bp, Artificial Sequence
  Description of Artificial Sequence: Synthetic oligonucleotide
tgctcctgcagaccctttaa

SEQ ID NO: 277 - DNA, 20 bp, Artificial Sequence
  Description of Artificial Sequence: Synthetic oligonucleotide
gtgctcctgcagacccttta

SEQ ID NO: 278 - DNA, 20 bp, Artificial Sequence
  Description of Artificial Sequence: Synthetic oligonucleotide
ggtgctcctgcagacccttt

SEQ ID NO: 279 - DNA, 20 bp, Artificial Sequence
  Description of Artificial Sequence: Synthetic oligonucleotide
aggtgctcctgcagaccctt

SEQ ID NO: 280 - DNA, 20 bp, Artificial Sequence
  Description of Artificial Sequence: Synthetic oligonucleotide
aaggtgctcctgcagaccct

SEQ ID NO: 281 - DNA, 20 bp, Artificial Sequence
  Description of Artificial Sequence: Synthetic oligonucleotide
gaaggtgctcctgcagaccc

SEQ ID NO: 282 - DNA, 20 bp, Artificial Sequence
  Description of Artificial Sequence: Synthetic oligonucleotide
agaaggtgctcctgcagacc

SEQ ID NO: 283 - DNA, 20 bp, Artificial Sequence
  Description of Artificial Sequence: Synthetic oligonucleotide
cagaaggtgctcctgcagac

SEQ ID NO: 284 - DNA, 20 bp, Artificial Sequence
  Description of Artificial Sequence: Synthetic oligonucleotide
acagaaggtgctcctgcaga

SEQ ID NO: 285 - DNA, 20 bp, Artificial Sequence
  Description of Artificial Sequence: Synthetic oligonucleotide
cacagaaggtgctcctgcag

SEQ ID NO: 286 - DNA, 20 bp, Artificial Sequence
  Description of Artificial Sequence: Synthetic oligonucleotide
ccacagaaggtgctcctgca

SEQ ID NO: 287 - DNA, 20 bp, Artificial Sequence
  Description of Artificial Sequence: Synthetic oligonucleotide
tccacagaaggtgctcctgc

SEQ ID NO: 288 - DNA, 20 bp, Artificial Sequence
  Description of Artificial Sequence: Synthetic oligonucleotide
ttccacagaaggtgctcctg

SEQ ID NO: 289 - DNA, 20 bp, Artificial Sequence
  Description of Artificial Sequence: Synthetic oligonucleotide
tttccacagaaggtgctcct

SEQ ID NO: 290 - DNA, 20 bp, Artificial Sequence
  Description of Artificial Sequence: Synthetic oligonucleotide
ttttccacagaaggtgctcc

SEQ ID NO: 291 - DNA, 20 bp, Artificial Sequence
  Description of Artificial Sequence: Synthetic oligonucleotide
attttccacagaaggtgctc

SEQ ID NO: 292 - DNA, 20 bp, Artificial Sequence
  Description of Artificial Sequence: Synthetic oligonucleotide
cattttccacagaaggtgct

SEQ ID NO: 293 - DNA, 20 bp, Artificial Sequence
  Description of Artificial Sequence: Synthetic oligonucleotide
acattttccacagaaggtgc

SEQ ID NO: 294 - DNA, 20 bp, Artificial Sequence
  Description of Artificial Sequence: Synthetic oligonucleotide
tacattttccacagaaggtg

SEQ ID NO: 295 - DNA, 20 bp, Artificial Sequence
  Description of Artificial Sequence: Synthetic oligonucleotide
ttacattttccacagaaggt

SEQ ID NO: 296 - DNA, 20 bp, Artificial Sequence
  Description of Artificial Sequence: Synthetic oligonucleotide
tttacattttccacagaagg

SEQ ID NO: 297 - DNA, 20 bp, Artificial Sequence
  Description of Artificial Sequence: Synthetic oligonucleotide
ctttacattttccacagaag

SEQ ID NO: 298 - DNA, 20 bp, Artificial Sequence
  Description of Artificial Sequence: Synthetic oligonucleotide
tctttacattttccacagaa

SEQ ID NO: 299 - DNA, 20 bp, Artificial Sequence
  Description of Artificial Sequence: Synthetic oligonucleotide
ttctttacattttccacaga

SEQ ID NO: 300 - DNA, 20 bp, Artificial Sequence
  Description of Artificial Sequence: Synthetic oligonucleotide
attctttacattttccacag

SEQ ID NO: 301 - DNA, 20 bp, Artificial Sequence
  Description of Artificial Sequence: Synthetic oligonucleotide
cattctttacattttccaca

SEQ ID NO: 302 - DNA, 20 bp, Artificial Sequence
  Description of Artificial Sequence: Synthetic oligonucleotide
ccattctttacattttccac

SEQ ID NO: 303 - DNA, 20 bp, Artificial Sequence
  Description of Artificial Sequence: Synthetic oligonucleotide
tccattctttacattttcca

SEQ ID NO: 304 - DNA, 20 bp, Artificial Sequence
  Description of Artificial Sequence: Synthetic oligonucleotide
ttccattctttacattttcc

SEQ ID NO: 305 - DNA, 20 bp, Artificial Sequence
  Description of Artificial Sequence: Synthetic oligonucleotide
attccattctttacattttc

SEQ ID NO: 306 - DNA, 20 bp, Artificial Sequence
  Description of Artificial Sequence: Synthetic oligonucleotide
gattccattctttacatttt

SEQ ID NO: 307 - DNA, 20 bp, Artificial Sequence
  Description of Artificial Sequence: Synthetic oligonucleotide
tgattccattctttacattt

SEQ ID NO: 308 - DNA, 20 bp, Artificial Sequence
  Description of Artificial Sequence: Synthetic oligonucleotide
ctgattccattctttacatt

SEQ ID NO: 309 - DNA, 20 bp, Artificial Sequence
  Description of Artificial Sequence: Synthetic oligonucleotide
tctgattccattctttacat

SEQ ID NO: 310 - DNA, 20 bp, Artificial Sequence
  Description of Artificial Sequence: Synthetic oligonucleotide
ttctgattccattctttaca

SEQ ID NO: 311 - DNA, 20 bp, Artificial Sequence
  Description of Artificial Sequence: Synthetic oligonucleotide
gttctgattccattctttac

SEQ ID NO: 312 - DNA, 20 bp, Artificial Sequence
  Description of Artificial Sequence: Synthetic oligonucleotide
tgttctgattccattcttta

SEQ ID NO: 313 - DNA, 20 bp, Artificial Sequence
  Description of Artificial Sequence: Synthetic oligonucleotide
ctgttctgattccattcttt

SEQ ID NO: 314 - DNA, 20 bp, Artificial Sequence
  Description of Artificial Sequence: Synthetic oligonucleotide
cctgttctgattccattctt

SEQ ID NO: 315 - DNA, 20 bp, Artificial Sequence
  Description of Artificial Sequence: Synthetic oligonucleotide
acctgttctgattccattct

SEQ ID NO: 316 - DNA, 20 bp, Artificial Sequence
  Description of Artificial Sequence: Synthetic oligonucleotide
aacctgttctgattccattc

SEQ ID NO: 317 - DNA, 20 bp, Artificial Sequence
  Description of Artificial Sequence: Synthetic oligonucleotide
aaacctgttctgattccatt

SEQ ID NO: 318 - DNA, 20 bp, Artificial Sequence
  Description of Artificial Sequence: Synthetic oligonucleotide
aaaacctgttctgattccat

SEQ ID NO: 319 - DNA, 20 bp, Artificial Sequence
  Description of Artificial Sequence: Synthetic oligonucleotide
gaaaacctgttctgattcca

SEQ ID NO: 320 - DNA, 20 bp, Artificial Sequence
  Description of Artificial Sequence: Synthetic oligonucleotide
agaaaacctgttctgattcc

SEQ ID NO: 321 - DNA, 20 bp, Artificial Sequence
  Description of Artificial Sequence: Synthetic oligonucleotide
cagaaaacctgttctgattc

SEQ ID NO: 322 - DNA, 20 bp, Artificial Sequence
  Description of Artificial Sequence: Synthetic oligonucleotide
ccagaaaacctgttctgatt

SEQ ID NO: 323 - DNA, 20 bp, Artificial Sequence
  Description of Artificial Sequence: Synthetic oligonucleotide
tccagaaaacctgttctgat

SEQ ID NO: 324 - DNA, 20 bp, Artificial Sequence
  Description of Artificial Sequence: Synthetic oligonucleotide
ctccagaaaacctgttctga

SEQ ID NO: 325 - DNA, 20 bp, Artificial Sequence
  Description of Artificial Sequence: Synthetic oligonucleotide
tctccagaaaacctgttctg

SEQ ID NO: 326 - DNA, 20 bp, Artificial Sequence
  Description of Artificial Sequence: Synthetic oligonucleotide
atctccagaaaacctgttct

SEQ ID NO: 327 - DNA, 20 bp, Artificial Sequence
  Description of Artificial Sequence: Synthetic oligonucleotide
aatctccagaaaacctgttc

SEQ ID NO: 328 - DNA, 20 bp, Artificial Sequence
  Description of Artificial Sequence: Synthetic oligonucleotide
caatctccagaaaacctgtt

SEQ ID NO: 329 - DNA, 20 bp, Artificial Sequence
  Description of Artificial Sequence: Synthetic oligonucleotide
tcaatctccagaaaacctgt

SEQ ID NO: 330 - DNA, 20 bp, Artificial Sequence
  Description of Artificial Sequence: Synthetic oligonucleotide
atcaatctccagaaaacctg

SEQ ID NO: 331 - DNA, 20 bp, Artificial Sequence
  Description of Artificial Sequence: Synthetic oligonucleotide
catcaatctccagaaaacct

SEQ ID NO: 332 - DNA, 20 bp, Artificial Sequence
  Description of Artificial Sequence: Synthetic oligonucleotide
tcatcaatctccagaaaacc

SEQ ID NO: 333 - DNA, 20 bp, Artificial Sequence
  Description of Artificial Sequence: Synthetic oligonucleotide
ttcatcaatctccagaaaac

SEQ ID NO: 334 - DNA, 20 bp, Artificial Sequence
  Description of Artificial Sequence: Synthetic oligonucleotide
gttcatcaatctccagaaaa

SEQ ID NO: 335 - DNA, 20 bp, Artificial Sequence
  Description of Artificial Sequence: Synthetic oligonucleotide
tgttcatcaatctccagaaa

SEQ ID NO: 336 - DNA, 20 bp, Artificial Sequence
  Description of Artificial Sequence: Synthetic oligonucleotide
gtgttcatcaatctccagaa

SEQ ID NO: 337 - DNA, 20 bp, Artificial Sequence
  Description of Artificial Sequence: Synthetic oligonucleotide
tgtgttcatcaatctccaga

SEQ ID NO: 338 - DNA, 20 bp, Artificial Sequence
  Description of Artificial Sequence: Synthetic oligonucleotide
atgtgttcatcaatctccag

SEQ ID NO: 339 - DNA, 20 bp, Artificial Sequence
  Description of Artificial Sequence: Synthetic oligonucleotide
catgtgttcatcaatctcca

SEQ ID NO: 340 - DNA, 20 bp, Artificial Sequence
  Description of Artificial Sequence: Synthetic oligonucleotide
tcatgtgttcatcaatctcc

SEQ ID NO: 341 - DNA, 20 bp, Artificial Sequence
  Description of Artificial Sequence: Synthetic oligonucleotide
ctcatgtgttcatcaatctc

SEQ ID NO: 342 - DNA, 20 bp, Artificial Sequence
  Description of Artificial Sequence: Synthetic oligonucleotide
tctcatgtgttcatcaatct

SEQ ID NO: 343 - DNA, 20 bp, Artificial Sequence
  Description of Artificial Sequence: Synthetic oligonucleotide
ctctcatgtgttcatcaatc

SEQ ID NO: 344 - DNA, 20 bp, Artificial Sequence
  Description of Artificial Sequence: Synthetic oligonucleotide
actctcatgtgttcatcaat

SEQ ID NO: 345 - DNA, 20 bp, Artificial Sequence
  Description of Artificial Sequence: Synthetic oligonucleotide
aactctcatgtgttcatcaa

SEQ ID NO: 346 - DNA, 20 bp, Artificial Sequence
  Description of Artificial Sequence: Synthetic oligonucleotide
taactctcatgtgttcatca

SEQ ID NO: 347 - DNA, 20 bp, Artificial Sequence
  Description of Artificial Sequence: Synthetic oligonucleotide
ataactctcatgtgttcatc

SEQ ID NO: 348 - DNA, 20 bp, Artificial Sequence
  Description of Artificial Sequence: Synthetic oligonucleotide
cataactctcatgtgttcat

SEQ ID NO: 349 - DNA, 20 bp, Artificial Sequence
  Description of Artificial Sequence: Synthetic oligonucleotide
acataactctcatgtgttca

SEQ ID NO: 350 - DNA, 20 bp, Artificial Sequence
  Description of Artificial Sequence: Synthetic oligonucleotide
gacataactctcatgtgttc

SEQ ID NO: 351 - DNA, 20 bp, Artificial Sequence
  Description of Artificial Sequence: Synthetic oligonucleotide
tgacataactctcatgtgtt

SEQ ID NO: 352 - DNA, 20 bp, Artificial Sequence
  Description of Artificial Sequence: Synthetic oligonucleotide
ctgacataactctcatgtgt

SEQ ID NO: 353 - DNA, 20 bp, Artificial Sequence
  Description of Artificial Sequence: Synthetic oligonucleotide
tctgacataactctcatgtg

SEQ ID NO: 354 - DNA, 20 bp, Artificial Sequence
  Description of Artificial Sequence: Synthetic oligonucleotide
ctctgacataactctcatgt

SEQ ID NO: 355 - DNA, 20 bp, Artificial Sequence
  Description of Artificial Sequence: Synthetic oligonucleotide
tctctgacataactctcatg

SEQ ID NO: 356 - DNA, 20 bp, Artificial Sequence
  Description of Artificial Sequence: Synthetic oligonucleotide
ttctctgacataactctcat

SEQ ID NO: 357 - DNA, 20 bp, Artificial Sequence
  Description of Artificial Sequence: Synthetic oligonucleotide
cttctctgacataactctca

SEQ ID NO: 358 - DNA, 20 bp, Artificial Sequence
  Description of Artificial Sequence: Synthetic oligonucleotide
tcttctctgacataactctc

SEQ ID NO: 359 - DNA, 20 bp, Artificial Sequence
  Description of Artificial Sequence: Synthetic oligonucleotide
ttcttctctgacataactct

SEQ ID NO: 360 - DNA, 20 bp, Artificial Sequence
  Description of Artificial Sequence: Synthetic oligonucleotide
tttcttctctgacataactc

SEQ ID NO: 361 - DNA, 20 bp, Artificial Sequence
  Description of Artificial Sequence: Synthetic oligonucleotide
gtttcttctctgacataact

SEQ ID NO: 362 - DNA, 20 bp, Artificial Sequence
  Description of Artificial Sequence: Synthetic oligonucleotide
tgtttcttctctgacataac

SEQ ID NO: 363 - DNA, 20 bp, Artificial Sequence
  Description of Artificial Sequence: Synthetic oligonucleotide
atgtttcttctctgacataa

SEQ ID NO: 364 - DNA, 20 bp, Artificial Sequence
  Description of Artificial Sequence: Synthetic oligonucleotide
catgtttcttctctgacata

SEQ ID NO: 365 - DNA, 20 bp, Artificial Sequence
  Description of Artificial Sequence: Synthetic oligonucleotide
ccatgtttcttctctgacat

SEQ ID NO: 366 - DNA, 20 bp, Artificial Sequence
  Description of Artificial Sequence: Synthetic oligonucleotide
accatgtttcttctctgaca

SEQ ID NO: 367 - DNA, 20 bp, Artificial Sequence
  Description of Artificial Sequence: Synthetic oligonucleotide
caccatgtttcttctctgac

SEQ ID NO: 368 - DNA, 20 bp, Artificial Sequence
  Description of Artificial Sequence: Synthetic oligonucleotide
gcaccatgtttcttctctga

SEQ ID NO: 369 - DNA, 20 bp, Artificial Sequence
  Description of Artificial Sequence: Synthetic oligonucleotide
tgcaccatgtttcttctctg

SEQ ID NO: 370 - DNA, 20 bp, Artificial Sequence
  Description of Artificial Sequence: Synthetic oligonucleotide
ctgcaccatgtttcttctct

SEQ ID NO: 371 - DNA, 20 bp, Artificial Sequence
  Description of Artificial Sequence: Synthetic oligonucleotide
tctgcaccatgtttcttctc

SEQ ID NO: 372 - DNA, 20 bp, Artificial Sequence
  Description of Artificial Sequence: Synthetic oligonucleotide
atctgcaccatgtttcttct

SEQ ID NO: 373 - DNA, 20 bp, Artificial Sequence
  Description of Artificial Sequence: Synthetic oligonucleotide
tatctgcaccatgtttcttc

SEQ ID NO: 374 - DNA, 20 bp, Artificial Sequence
  Description of Artificial Sequence: Synthetic oligonucleotide
ctatctgcaccatgtttctt

SEQ ID NO: 375 - DNA, 20 bp, Artificial Sequence
  Description of Artificial Sequence: Synthetic oligonucleotide
tctatctgcaccatgtttct

SEQ ID NO: 376 - DNA, 20 bp, Artificial Sequence
  Description of Artificial Sequence: Synthetic oligonucleotide
ttctatctgcaccatgtttc

SEQ ID NO: 377 - DNA, 20 bp, Artificial Sequence
  Description of Artificial Sequence: Synthetic oligonucleotide
cttctatctgcaccatgttt

SEQ ID NO: 378 - DNA, 20 bp, Artificial Sequence
  Description of Artificial Sequence: Synthetic oligonucleotide
acttctatctgcaccatgtt

SEQ ID NO: 379 - DNA, 20 bp, Artificial Sequence
  Description of Artificial Sequence: Synthetic oligonucleotide
cacttctatctgcaccatgt

SEQ ID NO: 380 - DNA, 20 bp, Artificial Sequence
  Description of Artificial Sequence: Synthetic oligonucleotide
ccacttctatctgcaccatg

SEQ ID NO: 381 - DNA, 20 bp, Artificial Sequence
  Description of Artificial Sequence: Synthetic oligonucleotide
cccacttctatctgcaccat

SEQ ID NO: 382 - DNA, 20 bp, Artificial Sequence
  Description of Artificial Sequence: Synthetic oligonucleotide
acccacttctatctgcacca

SEQ ID NO: 383 - DNA, 20 bp, Artificial Sequence
  Description of Artificial Sequence: Synthetic oligonucleotide
gacccacttctatctgcacc

SEQ ID NO: 384 - DNA, 20 bp, Artificial Sequence
  Description of Artificial Sequence: Synthetic oligonucleotide
tgacccacttctatctgcac

SEQ ID NO: 385 - DNA, 20 bp, Artificial Sequence
  Description of Artificial Sequence: Synthetic oligonucleotide
ttgacccacttctatctgca

SEQ ID NO: 386 - DNA, 20 bp, Artificial Sequence
  Description of Artificial Sequence: Synthetic oligonucleotide
gttgacccacttctatctgc

SEQ ID NO: 387 - DNA, 20 bp, Artificial Sequence
  Description of Artificial Sequence: Synthetic oligonucleotide
tgttgacccacttctatctg

SEQ ID NO: 388 - DNA, 20 bp, Artificial Sequence
  Description of Artificial Sequence: Synthetic oligonucleotide
ctgttgacccacttctatct

SEQ ID NO: 389 - DNA, 20 bp, Artificial Sequence
  Description of Artificial Sequence: Synthetic oligonucleotide
gctgttgacccacttctatc

SEQ ID NO: 390 - DNA, 20 bp, Artificial Sequence
  Description of Artificial Sequence: Synthetic oligonucleotide
agctgttgacccacttctat

SEQ ID NO: 391 - DNA, 20 bp, Artificial Sequence
  Description of Artificial Sequence: Synthetic oligonucleotide
cagctgttgacccacttcta

SEQ ID NO: 392 - DNA, 20 bp, Artificial Sequence
  Description of Artificial Sequence: Synthetic oligonucleotide
acagctgttgacccacttct

SEQ ID NO: 393 - DNA, 20 bp, Artificial Sequence
  Description of Artificial Sequence: Synthetic oligonucleotide
tacagctgttgacccacttc

SEQ ID NO: 394 - DNA, 20 bp, Artificial Sequence
  Description of Artificial Sequence: Synthetic oligonucleotide
ctacagctgttgacccactt

SEQ ID NO: 395 - DNA, 20 bp, Artificial Sequence
  Description of Artificial Sequence: Synthetic oligonucleotide
cctacagctgttgacccact

SEQ ID NO: 396 - DNA, 20 bp, Artificial Sequence
  Description of Artificial Sequence: Synthetic oligonucleotide
acctacagctgttgacccac

SEQ ID NO: 397 - DNA, 20 bp, Artificial Sequence
  Description of Artificial Sequence: Synthetic oligonucleotide
cacctacagctgttgaccca

SEQ ID NO: 398 - DNA, 20 bp, Artificial Sequence
  Description of Artificial Sequence: Synthetic oligonucleotide
acacctacagctgttgaccc

SEQ ID NO: 399 - DNA, 20 bp, Artificial Sequence
  Description of Artificial Sequence: Synthetic oligonucleotide
gacacctacagctgttgacc

SEQ ID NO: 400 - DNA, 20 bp, Artificial Sequence
  Description of Artificial Sequence: Synthetic oligonucleotide
agacacctacagctgttgac

SEQ ID NO: 401 - DNA, 20 bp, Artificial Sequence
  Description of Artificial Sequence: Synthetic oligonucleotide
aagacacctacagctgttga

SEQ ID NO: 402 - DNA, 20 bp, Artificial Sequence
  Description of Artificial Sequence: Synthetic oligonucleotide
taagacacctacagctgttg

SEQ ID NO: 403 - DNA, 20 bp, Artificial Sequence
  Description of Artificial Sequence: Synthetic oligonucleotide
ttaagacacctacagctgtt

SEQ ID NO: 404 - DNA, 20 bp, Artificial Sequence
  Description of Artificial Sequence: Synthetic oligonucleotide
attaagacacctacagctgt

SEQ ID NO: 405 - DNA, 20 bp, Artificial Sequence
  Description of Artificial Sequence: Synthetic oligonucleotide
aattaagacacctacagctg

SEQ ID NO: 406 - DNA, 20 bp, Artificial Sequence
  Description of Artificial Sequence: Synthetic oligonucleotide
aaattaagacacctacagct

SEQ ID NO: 407 - DNA, 20 bp, Artificial Sequence
  Description of Artificial Sequence: Synthetic oligonucleotide
gaaattaagacacctacagc

SEQ ID NO: 408 - DNA, 20 bp, Artificial Sequence
  Description of Artificial Sequence: Synthetic oligonucleotide
agaaattaagacacctacag

SEQ ID NO: 409 - DNA, 20 bp, Artificial Sequence
  Description of Artificial Sequence: Synthetic oligonucleotide
gagaaattaagacacctaca

SEQ ID NO: 410 - DNA, 20 bp, Artificial Sequence
  Description of Artificial Sequence: Synthetic oligonucleotide
ggagaaattaagacacctac

SEQ ID NO: 411 - DNA, 20 bp, Artificial Sequence
  Description of Artificial Sequence: Synthetic oligonucleotide
gggagaaattaagacaccta

SEQ ID NO: 412 - DNA, 20 bp, Artificial Sequence
  Description of Artificial Sequence: Synthetic oligonucleotide
ggggagaaattaagacacct

SEQ ID NO: 413 - DNA, 20 bp, Artificial Sequence
  Description of Artificial Sequence: Synthetic oligonucleotide
tggggagaaattaagacacc

SEQ ID NO: 414 - DNA, 20 bp, Artificial Sequence
  Description of Artificial Sequence: Synthetic oligonucleotide
ttggggagaaattaagacac

SEQ ID NO: 415 - DNA, 20 bp, Artificial Sequence
  Description of Artificial Sequence: Synthetic oligonucleotide
gttggggagaaattaagaca

SEQ ID NO: 416 - DNA, 20 bp, Artificial Sequence
  Description of Artificial Sequence: Synthetic oligonucleotide
tgttggggagaaattaagac

SEQ ID NO: 417 - DNA, 20 bp, Artificial Sequence
  Description of Artificial Sequence: Synthetic oligonucleotide
atgttggggagaaattaaga

SEQ ID NO: 418 - DNA, 20 bp, Artificial Sequence
  Description of Artificial Sequence: Synthetic oligonucleotide
tatgttggggagaaattaag

SEQ ID NO: 419 - DNA, 20 bp, Artificial Sequence
  Description of Artificial Sequence: Synthetic oligonucleotide
gtatgttggggagaaattaa

SEQ ID NO: 420 - DNA, 20 bp, Artificial Sequence
  Description of Artificial Sequence: Synthetic oligonucleotide
agtatgttggggagaaatta

SEQ ID NO: 421 - DNA, 20 bp, Artificial Sequence
  Description of Artificial Sequence: Synthetic oligonucleotide
aagtatgttggggagaaatt

SEQ ID NO: 422 - DNA, 20 bp, Artificial Sequence
  Description of Artificial Sequence: Synthetic oligonucleotide
taagtatgttggggagaaat

SEQ ID NO: 423 - DNA, 20 bp, Artificial Sequence
  Description of Artificial Sequence: Synthetic oligonucleotide
ataagtatgttggggagaaa

SEQ ID NO: 424 - DNA, 20 bp, Artificial Sequence
  Description of Artificial Sequence: Synthetic oligonucleotide
aataagtatgttggggagaa

SEQ ID NO: 425 - DNA, 20 bp, Artificial Sequence
  Description of Artificial Sequence: Synthetic oligonucleotide
aaataagtatgttggggaga

SEQ ID NO: 426 - DNA, 20 bp, Artificial Sequence
  Description of Artificial Sequence: Synthetic oligonucleotide
gaaataagtatgttggggag

SEQ ID NO: 427 - DNA, 20 bp, Artificial Sequence
  Description of Artificial Sequence: Synthetic oligonucleotide
tgaaataagtatgttgggga

SEQ ID NO: 428 - DNA, 20 bp, Artificial Sequence
  Description of Artificial Sequence: Synthetic oligonucleotide
atgaaataagtatgttgggg

SEQ ID NO: 429 - DNA, 20 bp, Artificial Sequence
  Description of Artificial Sequence: Synthetic oligonucleotide
aatgaaataagtatgttggg

SEQ ID NO: 430 - DNA, 20 bp, Artificial Sequence
  Description of Artificial Sequence: Synthetic oligonucleotide
taatgaaataagtatgttgg

SEQ ID NO: 431 - DNA, 20 bp, Artificial Sequence
  Description of Artificial Sequence: Synthetic oligonucleotide
ttaatgaaataagtatgttg

SEQ ID NO: 432 - DNA, 20 bp, Artificial Sequence
  Description of Artificial Sequence: Synthetic oligonucleotide
gttaatgaaataagtatgtt

SEQ ID NO: 433 - DNA, 20 bp, Artificial Sequence
  Description of Artificial Sequence: Synthetic oligonucleotide
agttaatgaaataagtatgt

SEQ ID NO: 434 - DNA, 20 bp, Artificial Sequence
  Description of Artificial Sequence: Synthetic oligonucleotide
cagttaatgaaataagtatg

SEQ ID NO: 435 - DNA, 20 bp, Artificial Sequence
  Description of Artificial Sequence: Synthetic oligonucleotide
acagttaatgaaataagtat

SEQ ID NO: 436 - DNA, 20 bp, Artificial Sequence
  Description of Artificial Sequence: Synthetic oligonucleotide
cacagttaatgaaataagta

SEQ ID NO: 437 - DNA, 20 bp, Artificial Sequence
  Description of Artificial Sequence: Synthetic oligonucleotide
ccacagttaatgaaataagt

SEQ ID NO: 438 - DNA, 20 bp, Artificial Sequence
  Description of Artificial Sequence: Synthetic oligonucleotide
tccacagttaatgaaataag

SEQ ID NO: 439 - DNA, 20 bp, Artificial Sequence
  Description of Artificial Sequence: Synthetic oligonucleotide
ctccacagttaatgaaataa

SEQ ID NO: 440 - DNA, 20 bp, Artificial Sequence
  Description of Artificial Sequence: Synthetic oligonucleotide
tctccacagttaatgaaata

SEQ ID NO: 441 - DNA, 20 bp, Artificial Sequence
  Description of Artificial Sequence: Synthetic oligonucleotide
gtctccacagttaatgaaat

SEQ ID NO: 442 - DNA, 20 bp, Artificial Sequence
  Description of Artificial Sequence: Synthetic oligonucleotide
agtctccacagttaatgaaa

SEQ ID NO: 443 - DNA, 20 bp, Artificial Sequence
  Description of Artificial Sequence: Synthetic oligonucleotide
gagtctccacagttaatgaa

SEQ ID NO: 444 - DNA, 20 bp, Artificial Sequence
  Description of Artificial Sequence: Synthetic oligonucleotide
tgagtctccacagttaatga

SEQ ID NO: 445 - DNA, 20 bp, Artificial Sequence
  Description of Artificial Sequence: Synthetic oligonucleotide
ttgagtctccacagttaatg

SEQ ID NO: 446 - DNA, 20 bp, Artificial Sequence
  Description of Artificial Sequence: Synthetic oligonucleotide
cttgagtctccacagttaat

SEQ ID NO: 447 - DNA, 20 bp, Artificial Sequence
  Description of Artificial Sequence: Synthetic oligonucleotide
tcttgagtctccacagttaa

SEQ ID NO: 448 - DNA, 20 bp, Artificial Sequence
  Description of Artificial Sequence: Synthetic oligonucleotide
ctcttgagtctccacagtta

SEQ ID NO: 449 - DNA, 20 bp, Artificial Sequence
  Description of Artificial Sequence: Synthetic oligonucleotide
cctcttgagtctccacagtt

SEQ ID NO: 450 - DNA, 20 bp, Artificial Sequence
  Description of Artificial Sequence: Synthetic oligonucleotide
acctcttgagtctccacagt

SEQ ID NO: 451 - DNA, 20 bp, Artificial Sequence
  Description of Artificial Sequence: Synthetic oligonucleotide
aacctcttgagtctccacag

SEQ ID NO: 452 - DNA, 20 bp, Artificial Sequence
  Description of Artificial Sequence: Synthetic oligonucleotide
aaacctcttgagtctccaca

SEQ ID NO: 453 - DNA, 20 bp, Artificial Sequence
  Description of Artificial Sequence: Synthetic oligonucleotide
taaacctcttgagtctccac

SEQ ID NO: 454 - DNA, 20 bp, Artificial Sequence
  Description of Artificial Sequence: Synthetic oligonucleotide
gtaaacctcttgagtctcca

SEQ ID NO: 455 - DNA, 20 bp, Artificial Sequence
  Description of Artificial Sequence: Synthetic oligonucleotide
agtaaacctcttgagtctcc

SEQ ID NO: 456 - DNA, 20 bp, Artificial Sequence
  Description of Artificial Sequence: Synthetic oligonucleotide
aagtaaacctcttgagtctc

SEQ ID NO: 457 - DNA, 20 bp, Artificial Sequence
  Description of Artificial Sequence: Synthetic oligonucleotide
aaagtaaacctcttgagtct

SEQ ID NO: 458 - DNA, 20 bp, Artificial Sequence
  Description of Artificial Sequence: Synthetic oligonucleotide
caaagtaaacctcttgagtc

SEQ ID NO: 459 - DNA, 20 bp, Artificial Sequence
  Description of Artificial Sequence: Synthetic oligonucleotide
acaaagtaaacctcttgagt

SEQ ID NO: 460 - DNA, 20 bp, Artificial Sequence
  Description of Artificial Sequence: Synthetic oligonucleotide
tacaaagtaaacctcttgag

SEQ ID NO: 461 - DNA, 20 bp, Artificial Sequence
  Description of Artificial Sequence: Synthetic oligonucleotide
ctacaaagtaaacctcttga

SEQ ID NO: 462 - DNA, 20 bp, Artificial Sequence
  Description of Artificial Sequence: Synthetic oligonucleotide
cctacaaagtaaacctcttg

SEQ ID NO: 463 - DNA, 20 bp, Artificial Sequence
  Description of Artificial Sequence: Synthetic oligonucleotide
tcctacaaagtaaacctctt

SEQ ID NO: 464 - DNA, 20 bp, Artificial Sequence
  Description of Artificial Sequence: Synthetic oligonucleotide
ttcctacaaagtaaacctct

SEQ ID NO: 465 - DNA, 20 bp, Artificial Sequence
  Description of Artificial Sequence: Synthetic oligonucleotide
gttcctacaaagtaaacctc

SEQ ID NO: 466 - DNA, 20 bp, Artificial Sequence
  Description of Artificial Sequence: Synthetic oligonucleotide
tgttcctacaaagtaaacct

SEQ ID NO: 467 - DNA, 20 bp, Artificial Sequence
  Description of Artificial Sequence: Synthetic oligonucleotide
ctgttcctacaaagtaaacc

SEQ ID NO: 468 - DNA, 20 bp, Artificial Sequence
  Description of Artificial Sequence: Synthetic oligonucleotide
cctgttcctacaaagtaaac

SEQ ID NO: 469 - DNA, 20 bp, Artificial Sequence
  Description of Artificial Sequence: Synthetic oligonucleotide
tcctgttcctacaaagtaaa

SEQ ID NO: 470 - DNA, 20 bp, Artificial Sequence
  Description of Artificial Sequence: Synthetic oligonucleotide
ttcctgttcctacaaagtaa

SEQ ID NO: 471 - DNA, 20 bp, Artificial Sequence
  Description of Artificial Sequence: Synthetic oligonucleotide
tttcctgttcctacaaagta

SEQ ID NO: 472 - DNA, 20 bp, Artificial Sequence
  Description of Artificial Sequence: Synthetic oligonucleotide
ctttcctgttcctacaaagt

SEQ ID NO: 473 - DNA, 20 bp, Artificial Sequence
  Description of Artificial Sequence: Synthetic oligonucleotide
actttcctgttcctacaaag

SEQ ID NO: 474 - DNA, 20 bp, Artificial Sequence
  Description of Artificial Sequence: Synthetic oligonucleotide
aactttcctgttcctacaaa

SEQ ID NO: 475 - DNA, 20 bp, Artificial Sequence
  Description of Artificial Sequence: Synthetic oligonucleotide
gaactttcctgttcctacaa

SEQ ID NO: 476 - DNA, 20 bp, Artificial Sequence
  Description of Artificial Sequence: Synthetic oligonucleotide
tgaactttcctgttcctaca

SEQ ID NO: 477 - DNA, 20 bp, Artificial Sequence
  Description of Artificial Sequence: Synthetic oligonucleotide
atgaactttcctgttcctac

SEQ ID NO: 478 - DNA, 20 bp, Artificial Sequence
  Description of Artificial Sequence: Synthetic oligonucleotide
aatgaactttcctgttccta

SEQ ID NO: 479 - DNA, 20 bp, Artificial Sequence
  Description of Artificial Sequence: Synthetic oligonucleotide
aaatgaactttcctgttcct

SEQ ID NO: 480 - DNA, 20 bp, Artificial Sequence
  Description of Artificial Sequence: Synthetic oligonucleotide
gaaatgaactttcctgttcc

SEQ ID NO: 481 - DNA, 20 bp, Artificial Sequence
  Description of Artificial Sequence: Synthetic oligonucleotide
agaaatgaactttcctgttc

SEQ ID NO: 482 - DNA, 20 bp, Artificial Sequence
  Description of Artificial Sequence: Synthetic oligonucleotide
aagaaatgaactttcctgtt

SEQ ID NO: 483 - DNA, 20 bp, Artificial Sequence
  Description of Artificial Sequence: Synthetic oligonucleotide
gaagaaatgaactttcctgt

SEQ ID NO: 484 - DNA, 20 bp, Artificial Sequence
  Description of Artificial Sequence: Synthetic oligonucleotide
tgaagaaatgaactttcctg

SEQ ID NO: 485 - DNA, 20 bp, Artificial Sequence
  Description of Artificial Sequence: Synthetic oligonucleotide
gtgaagaaatgaactttcct

SEQ ID NO: 486 - DNA, 20 bp, Artificial Sequence
  Description of Artificial Sequence: Synthetic oligonucleotide
tgtgaagaaatgaactttcc

SEQ ID NO: 487 - DNA, 20 bp, Artificial Sequence
  Description of Artificial Sequence: Synthetic oligonucleotide
gtgtgaagaaatgaactttc

SEQ ID NO: 488 - DNA, 20 bp, Artificial Sequence
  Description of Artificial Sequence: Synthetic oligonucleotide
tgtgtgaagaaatgaacttt

SEQ ID NO: 489 - DNA, 20 bp, Artificial Sequence
  Description of Artificial Sequence: Synthetic oligonucleotide
ttgtgtgaagaaatgaactt

SEQ ID NO: 490 - DNA, 20 bp, Artificial Sequence
  Description of Artificial Sequence: Synthetic oligonucleotide
cttgtgtgaagaaatgaact

SEQ ID NO: 491 - DNA, 20 bp, Artificial Sequence
  Description of Artificial Sequence: Synthetic oligonucleotide
tcttgtgtgaagaaatgaac

SEQ ID NO: 492 - DNA, 20 bp, Artificial Sequence
  Description of Artificial Sequence: Synthetic oligonucleotide
atcttgtgtgaagaaatgaa

SEQ ID NO: 493 - DNA, 20 bp, Artificial Sequence
  Description of Artificial Sequence: Synthetic oligonucleotide
gatcttgtgtgaagaaatga

SEQ ID NO: 494 - DNA, 20 bp, Artificial Sequence
  Description of Artificial Sequence: Synthetic oligonucleotide
tgatcttgtgtgaagaaatg

SEQ ID NO: 495 - DNA, 20 bp, Artificial Sequence
  Description of Artificial Sequence: Synthetic oligonucleotide
gtgatcttgtgtgaagaaat

SEQ ID NO: 496 - DNA, 20 bp, Artificial Sequence
  Description of Artificial Sequence: Synthetic oligonucleotide
tgtgatcttgtgtgaagaaa

SEQ ID NO: 497 - DNA, 20 bp, Artificial Sequence
  Description of Artificial Sequence: Synthetic oligonucleotide
ttgtgatcttgtgtgaagaa

SEQ ID NO: 498 - DNA, 20 bp, Artificial Sequence
  Description of Artificial Sequence: Synthetic oligonucleotide
tttgtgatcttgtgtgaaga

SEQ ID NO: 499 - DNA, 20 bp, Artificial Sequence
  Description of Artificial Sequence: Synthetic oligonucleotide
gtttgtgatcttgtgtgaag

SEQ ID NO: 500 - DNA, 20 bp, Artificial Sequence
  Description of Artificial Sequence: Synthetic oligonucleotide
ggtttgtgatcttgtgtgaa

SEQ ID NO: 501 - DNA, 20 bp, Artificial Sequence
  Description of Artificial Sequence: Synthetic oligonucleotide
tggtttgtgatcttgtgtga

SEQ ID NO: 502 - DNA, 20 bp, Artificial Sequence
  Description of Artificial Sequence: Synthetic oligonucleotide
ttggtttgtgatcttgtgtg

SEQ ID NO: 503 - DNA, 20 bp, Artificial Sequence
  Description of Artificial Sequence: Synthetic oligonucleotide
cttggtttgtgatcttgtgt

SEQ ID NO: 504 - DNA, 20 bp, Artificial Sequence
  Description of Artificial Sequence: Synthetic oligonucleotide
acttggtttgtgatcttgtg

SEQ ID NO: 505 - DNA, 20 bp, Artificial Sequence
  Description of Artificial Sequence: Synthetic oligonucleotide
tacttggtttgtgatcttgt

SEQ ID NO: 506 - DNA, 20 bp, Artificial Sequence
  Description of Artificial Sequence: Synthetic oligonucleotide
ttacttggtttgtgatcttg

SEQ ID NO: 507 - DNA, 20 bp, Artificial Sequence
  Description of Artificial Sequence: Synthetic oligonucleotide
attacttggtttgtgatctt

SEQ ID NO: 508 - DNA, 20 bp, Artificial Sequence
  Description of Artificial Sequence: Synthetic oligonucleotide
gattacttggtttgtgatct

SEQ ID NO: 509 - DNA, 20 bp, Artificial Sequence
  Description of Artificial Sequence: Synthetic oligonucleotide
ggattacttggtttgtgatc

SEQ ID NO: 510 - DNA, 20 bp, Artificial Sequence
  Description of Artificial Sequence: Synthetic oligonucleotide
cggattacttggtttgtgat

SEQ ID NO: 511 - DNA, 20 bp, Artificial Sequence
  Description of Artificial Sequence: Synthetic oligonucleotide
gcggattacttggtttgtga

SEQ ID NO: 512 - DNA, 20 bp, Artificial Sequence
  Description of Artificial Sequence: Synthetic oligonucleotide
agcggattacttggtttgtg

SEQ ID NO: 513 - DNA, 20 bp, Artificial Sequence
  Description of Artificial Sequence: Synthetic oligonucleotide
cagcggattacttggtttgt

SEQ ID NO: 514 - DNA, 20 bp, Artificial Sequence
  Description of Artificial Sequence: Synthetic oligonucleotide
ccagcggattacttggtttg

SEQ ID NO: 515 - DNA, 20 bp, Artificial Sequence
  Description of Artificial Sequence: Synthetic oligonucleotide
tccagcggattacttggttt

SEQ ID NO: 516 - DNA, 20 bp, Artificial Sequence
  Description of Artificial Sequence: Synthetic oligonucleotide
ctccagcggattacttggtt

SEQ ID NO: 517 - DNA, 20 bp, Artificial Sequence
  Description of Artificial Sequence: Synthetic oligonucleotide
tctccagcggattacttggt

SEQ ID NO: 518 - DNA, 20 bp, Artificial Sequence
  Description of Artificial Sequence: Synthetic oligonucleotide
ttctccagcggattacttgg

SEQ ID NO: 519 - DNA, 20 bp, Artificial Sequence
  Description of Artificial Sequence: Synthetic oligonucleotide
tttctccagcggattacttg

SEQ ID NO: 520 - DNA, 20 bp, Artificial Sequence
  Description of Artificial Sequence: Synthetic oligonucleotide
ctttctccagcggattactt

SEQ ID NO: 521 - DNA, 20 bp, Artificial Sequence
  Description of Artificial Sequence: Synthetic oligonucleotide
tctttctccagcggattact

SEQ ID NO: 522 - DNA, 20 bp, Artificial Sequence
  Description of Artificial Sequence: Synthetic oligonucleotide
ttctttctccagcggattac

SEQ ID NO: 523 - DNA, 20 bp, Artificial Sequence
  Description of Artificial Sequence: Synthetic oligonucleotide
gttctttctccagcggatta

SEQ ID NO: 524 - DNA, 20 bp, Artificial Sequence
  Description of Artificial Sequence: Synthetic oligonucleotide
cgttctttctccagcggatt

SEQ ID NO: 525 - DNA, 20 bp, Artificial Sequence
  Description of Artificial Sequence: Synthetic oligonucleotide
tcgttctttctccagcggat

SEQ ID NO: 526 - DNA, 20 bp, Artificial Sequence
  Description of Artificial Sequence: Synthetic oligonucleotide
ttcgttctttctccagcgga

SEQ ID NO: 527 - DNA, 20 bp, Artificial Sequence
  Description of Artificial Sequence: Synthetic oligonucleotide
attcgttctttctccagcgg

SEQ ID NO: 528 - DNA, 20 bp, Artificial Sequence
  Description of Artificial Sequence: Synthetic oligonucleotide
aattcgttctttctccagcg

SEQ ID NO: 529 - DNA, 20 bp, Artificial Sequence
  Description of Artificial Sequence: Synthetic oligonucleotide
gaattcgttctttctccagc

SEQ ID NO: 530 - DNA, 20 bp, Artificial Sequence
  Description of Artificial Sequence: Synthetic oligonucleotide
tgaattcgttctttctccag

SEQ ID NO: 531 - DNA, 20 bp, Artificial Sequence
  Description of Artificial Sequence: Synthetic oligonucleotide
ctgaattcgttctttctcca

SEQ ID NO: 532 - DNA, 20 bp, Artificial Sequence
  Description of Artificial Sequence: Synthetic oligonucleotide
tctgaattcgttctttctcc

SEQ ID NO: 533 - DNA, 20 bp, Artificial Sequence
  Description of Artificial Sequence: Synthetic oligonucleotide
ttctgaattcgttctttctc

SEQ ID NO: 534 - DNA, 20 bp, Artificial Sequence
  Description of Artificial Sequence: Synthetic oligonucleotide
attctgaattcgttctttct

SEQ ID NO: 535 - DNA, 20 bp, Artificial Sequence
  Description of Artificial Sequence: Synthetic oligonucleotide
cattctgaattcgttctttc

SEQ ID NO: 536 - DNA, 20 bp, Artificial Sequence
  Description of Artificial Sequence: Synthetic oligonucleotide
gcattctgaattcgttcttt

SEQ ID NO: 537 - DNA, 20 bp, Artificial Sequence
  Description of Artificial Sequence: Synthetic oligonucleotide
tgcattctgaattcgttctt

SEQ ID NO: 538 - DNA, 20 bp, Artificial Sequence
  Description of Artificial Sequence: Synthetic oligonucleotide
ctgcattctgaattcgttct

SEQ ID NO: 539 - DNA, 20 bp, Artificial Sequence
  Description of Artificial Sequence: Synthetic oligonucleotide
cctgcattctgaattcgttc

SEQ ID NO: 540 - DNA, 20 bp, Artificial Sequence
  Description of Artificial Sequence: Synthetic oligonucleotide
acctgcattctgaattcgtt

SEQ ID NO: 541 - DNA, 20 bp, Artificial Sequence
  Description of Artificial Sequence: Synthetic oligonucleotide
cacctgcattctgaattcgt

SEQ ID NO: 542 - DNA, 20 bp, Artificial Sequence
  Description of Artificial Sequence: Synthetic oligonucleotide
ccacctgcattctgaattcg

SEQ ID NO: 543 - DNA, 20 bp, Artificial Sequence
  Description of Artificial Sequence: Synthetic oligonucleotide
gccacctgcattctgaattc

SEQ ID NO: 544 - DNA, 20 bp, Artificial Sequence
  Description of Artificial Sequence: Synthetic oligonucleotide
agccacctgcattctgaatt

SEQ ID NO: 545 - DNA, 20 bp, Artificial Sequence
  Description of Artificial Sequence: Synthetic oligonucleotide
gagccacctgcattctgaat

SEQ ID NO: 546 - DNA, 20 bp, Artificial Sequence
  Description of Artificial Sequence: Synthetic oligonucleotide
agagccacctgcattctgaa

SEQ ID NO: 547 - DNA, 20 bp, Artificial Sequence
  Description of Artificial Sequence: Synthetic oligonucleotide
cagagccacctgcattctga

SEQ ID NO: 548 - DNA, 20 bp, Artificial Sequence
  Description of Artificial Sequence: Synthetic oligonucleotide
acagagccacctgcattctg

SEQ ID NO: 549 - DNA, 20 bp, Artificial Sequence
  Description of Artificial Sequence: Synthetic oligonucleotide
tacagagccacctgcattct

SEQ ID NO: 550 - DNA, 20 bp, Artificial Sequence
  Description of Artificial Sequence: Synthetic oligonucleotide
ttacagagccacctgcattc

SEQ ID NO: 551 - DNA, 20 bp, Artificial Sequence
  Description of Artificial Sequence: Synthetic oligonucleotide
attacagagccacctgcatt

SEQ ID NO: 552 - DNA, 20 bp, Artificial Sequence
  Description of Artificial Sequence: Synthetic oligonucleotide
cattacagagccacctgcat

SEQ ID NO: 553 - DNA, 20 bp, Artificial Sequence
  Description of Artificial Sequence: Synthetic oligonucleotide
tcattacagagccacctgca

SEQ ID NO: 554 - DNA, 20 bp, Artificial Sequence
  Description of Artificial Sequence: Synthetic oligonucleotide
atcattacagagccacctgc

SEQ ID NO: 555 - DNA, 20 bp, Artificial Sequence
  Description of Artificial Sequence: Synthetic oligonucleotide
aatcattacagagccacctg

SEQ ID NO: 556 - DNA, 20 bp, Artificial Sequence
  Description of Artificial Sequence: Synthetic oligonucleotide
gaatcattacagagccacct

SEQ ID NO: 557 - DNA, 20 bp, Artificial Sequence
  Description of Artificial Sequence: Synthetic oligonucleotide
tgaatcattacagagccacc

SEQ ID NO: 558 - DNA, 20 bp, Artificial Sequence
  Description of Artificial Sequence: Synthetic oligonucleotide
ctgaatcattacagagccac

SEQ ID NO: 559 - DNA, 20 bp, Artificial Sequence
  Description of Artificial Sequence: Synthetic oligonucleotide
gctgaatcattacagagcca

SEQ ID NO: 560 - DNA, 20 bp, Artificial Sequence
  Description of Artificial Sequence: Synthetic oligonucleotide
cgctgaatcattacagagcc

SEQ ID NO: 561 - DNA, 20 bp, Artificial Sequence
  Description of Artificial Sequence: Synthetic oligonucleotide
acgctgaatcattacagagc

SEQ ID NO: 562 - DNA, 20 bp, Artificial Sequence
  Description of Artificial Sequence: Synthetic oligonucleotide
cacgctgaatcattacagag

SEQ ID NO: 563 - DNA, 20 bp, Artificial Sequence
  Description of Artificial Sequence: Synthetic oligonucleotide
acacgctgaatcattacaga

SEQ ID NO: 564 - DNA, 20 bp, Artificial Sequence
  Description of Artificial Sequence: Synthetic oligonucleotide
cacacgctgaatcattacag

SEQ ID NO: 565 - DNA, 20 bp, Artificial Sequence
  Description of Artificial Sequence: Synthetic oligonucleotide
tcacacgctgaatcattaca

SEQ ID NO: 566 - DNA, 20 bp, Artificial Sequence
  Description of Artificial Sequence: Synthetic oligonucleotide
ttcacacgctgaatcattac

SEQ ID NO: 567 - DNA, 20 bp, Artificial Sequence
  Description of Artificial Sequence: Synthetic oligonucleotide
attcacacgctgaatcatta

SEQ ID NO: 568 - DNA, 20 bp, Artificial Sequence
  Description of Artificial Sequence: Synthetic oligonucleotide
cattcacacgctgaatcatt

SEQ ID NO: 569 - DNA, 20 bp, Artificial Sequence
  Description of Artificial Sequence: Synthetic oligonucleotide
ccattcacacgctgaatcat

SEQ ID NO: 570 - DNA, 20 bp, Artificial Sequence
  Description of Artificial Sequence: Synthetic oligonucleotide
gccattcacacgctgaatca

SEQ ID NO: 571 - DNA, 20 bp, Artificial Sequence
  Description of Artificial Sequence: Synthetic oligonucleotide
agccattcacacgctgaatc

SEQ ID NO: 572 - DNA, 20 bp, Artificial Sequence
  Description of Artificial Sequence: Synthetic oligonucleotide
gagccattcacacgctgaat

SEQ ID NO: 573 - DNA, 20 bp, Artificial Sequence
  Description of Artificial Sequence: Synthetic oligonucleotide
agagccattcacacgctgaa

SEQ ID NO: 574 - DNA, 20 bp, Artificial Sequence
  Description of Artificial Sequence: Synthetic oligonucleotide
gagagccattcacacgctga

SEQ ID NO: 575 - DNA, 20 bp, Artificial Sequence
  Description of Artificial Sequence: Synthetic oligonucleotide
agagagccattcacacgctg

SEQ ID NO: 576 - DNA, 20 bp, Artificial Sequence
  Description of Artificial Sequence: Synthetic oligonucleotide
cagagagccattcacacgct

SEQ ID NO: 577 - DNA, 20 bp, Artificial Sequence
  Description of Artificial Sequence: Synthetic oligonucleotide
ccagagagccattcacacgc

SEQ ID NO: 578 - DNA, 20 bp, Artificial Sequence
  Description of Artificial Sequence: Synthetic oligonucleotide
gccagagagccattcacacg

SEQ ID NO: 579 - DNA, 20 bp, Artificial Sequence
  Description of Artificial Sequence: Synthetic oligonucleotide
agccagagagccattcacac

SEQ ID NO: 580 - DNA, 20 bp, Artificial Sequence
  Description of Artificial Sequence: Synthetic oligonucleotide
cagccagagagccattcaca

SEQ ID NO: 581 - DNA, 20 bp, Artificial Sequence
  Description of Artificial Sequence: Synthetic oligonucleotide
acagccagagagccattcac

SEQ ID NO: 582 - DNA, 20 bp, Artificial Sequence
  Description of Artificial Sequence: Synthetic oligonucleotide
tacagccagagagccattca

SEQ ID NO: 583 - DNA, 20 bp, Artificial Sequence
  Description of Artificial Sequence: Synthetic oligonucleotide
atacagccagagagccattc

SEQ ID NO: 584 - DNA, 20 bp, Artificial Sequence
  Description of Artificial Sequence: Synthetic oligonucleotide
gatacagccagagagccatt

SEQ ID NO: 585 - DNA, 20 bp, Artificial Sequence
  Description of Artificial Sequence: Synthetic oligonucleotide
cgatacagccagagagccat

SEQ ID NO: 586 - DNA, 20 bp, Artificial Sequence
  Description of Artificial Sequence: Synthetic oligonucleotide
tcgatacagccagagagcca

SEQ ID NO: 587 - DNA, 20 bp, Artificial Sequence
  Description of Artificial Sequence: Synthetic oligonucleotide
ctcgatacagccagagagcc

SEQ ID NO: 588 - DNA, 20 bp, Artificial Sequence
  Description of Artificial Sequence: Synthetic oligonucleotide
cctcgatacagccagagagc

SEQ ID NO: 589 - DNA, 20 bp, Artificial Sequence
  Description of Artificial Sequence: Synthetic oligonucleotide
ccctcgatacagccagagag

SEQ ID NO: 590 - DNA, 20 bp, Artificial Sequence
  Description of Artificial Sequence: Synthetic oligonucleotide
gccctcgatacagccagaga

SEQ ID NO: 591 - DNA, 20 bp, Artificial Sequence
  Description of Artificial Sequence: Synthetic oligonucleotide
ggccctcgatacagccagag

SEQ ID NO: 592 - DNA, 20 bp, Artificial Sequence
  Description of Artificial Sequence: Synthetic oligonucleotide
gggccctcgatacagccaga

SEQ ID NO: 593 - DNA, 20 bp, Artificial Sequence
  Description of Artificial Sequence: Synthetic oligonucleotide
agggccctcgatacagccag

SEQ ID NO: 594 - DNA, 20 bp, Artificial Sequence
  Description of Artificial Sequence: Synthetic oligonucleotide
aagggccctcgatacagcca

SEQ ID NO: 595 - DNA, 20 bp, Artificial Sequence
  Description of Artificial Sequence: Synthetic oligonucleotide
caagggccctcgatacagcc

SEQ ID NO: 596 - DNA, 20 bp, Artificial Sequence
  Description of Artificial Sequence: Synthetic oligonucleotide
ccaagggccctcgatacagc

SEQ ID NO: 597 - DNA, 20 bp, Artificial Sequence
  Description of Artificial Sequence: Synthetic oligonucleotide
cccaagggccctcgatacag

SEQ ID NO: 598 - DNA, 20 bp, Artificial Sequence
  Description of Artificial Sequence: Synthetic oligonucleotide
ccccaagggccctcgataca

SEQ ID NO: 599 - DNA, 20 bp, Artificial Sequence
  Description of Artificial Sequence: Synthetic oligonucleotide
tccccaagggccctcgatac

SEQ ID NO: 600 - DNA, 20 bp, Artificial Sequence
  Description of Artificial Sequence: Synthetic oligonucleotide
atccccaagggccctcgata

SEQ ID NO: 601 - DNA, 20 bp, Artificial Sequence
  Description of Artificial Sequence: Synthetic oligonucleotide
aatccccaagggccctcgat

SEQ ID NO: 602 - DNA, 20 bp, Artificial Sequence
  Description of Artificial Sequence: Synthetic oligonucleotide
aaatccccaagggccctcga

SEQ ID NO: 603 - DNA, 20 bp, Artificial Sequence
  Description of Artificial Sequence: Synthetic oligonucleotide
aaaatccccaagggccctcg

SEQ ID NO: 604 - DNA, 20 bp, Artificial Sequence
  Description of Artificial Sequence: Synthetic oligonucleotide
caaaatccccaagggccctc

SEQ ID NO: 605 - DNA, 20 bp, Artificial Sequence
  Description of Artificial Sequence: Synthetic oligonucleotide
tcaaaatccccaagggccct

SEQ ID NO: 606 - DNA, 20 bp, Artificial Sequence
  Description of Artificial Sequence: Synthetic oligonucleotide
atcaaaatccccaagggccc

SEQ ID NO: 607 - DNA, 20 bp, Artificial Sequence
  Description of Artificial Sequence: Synthetic oligonucleotide
aatcaaaatccccaagggcc

SEQ ID NO: 608 - DNA, 20 bp, Artificial Sequence
  Description of Artificial Sequence: Synthetic oligonucleotide
taatcaaaatccccaagggc

SEQ ID NO: 609 - DNA, 20 bp, Artificial Sequence
  Description of Artificial Sequence: Synthetic oligonucleotide
gtaatcaaaatccccaaggg

SEQ ID NO: 610 - DNA, 20 bp, Artificial Sequence
  Description of Artificial Sequence: Synthetic oligonucleotide
tgtaatcaaaatccccaagg

SEQ ID NO: 611 - DNA, 20 bp, Artificial Sequence
  Description of Artificial Sequence: Synthetic oligonucleotide
ttgtaatcaaaatccccaag

SEQ ID NO: 612 - DNA, 20 bp, Artificial Sequence
  Description of Artificial Sequence: Synthetic oligonucleotide
tttgtaatcaaaatccccaa

SEQ ID NO: 613 - DNA, 20 bp, Artificial Sequence
  Description of Artificial Sequence: Synthetic oligonucleotide
atttgtaatcaaaatcccca

SEQ ID NO: 614 - DNA, 20 bp, Artificial Sequence
  Description of Artificial Sequence: Synthetic oligonucleotide
catttgtaatcaaaatcccc

SEQ ID NO: 615 - DNA, 20 bp, Artificial Sequence
  Description of Artificial Sequence: Synthetic oligonucleotide
acatttgtaatcaaaatccc

SEQ ID NO: 616 - DNA, 20 bp, Artificial Sequence
  Description of Artificial Sequence: Synthetic oligonucleotide
cacatttgtaatcaaaatcc

SEQ ID NO: 617 - DNA, 20 bp, Artificial Sequence
  Description of Artificial Sequence: Synthetic oligonucleotide
acacatttgtaatcaaaatc

SEQ ID NO: 618 - DNA, 20 bp, Artificial Sequence
  Description of Artificial Sequence: Synthetic oligonucleotide
gacacatttgtaatcaaaat

SEQ ID NO: 619 - DNA, 20 bp, Artificial Sequence
  Description of Artificial Sequence: Synthetic oligonucleotide
ggacacatttgtaatcaaaa

SEQ ID NO: 620 - DNA, 20 bp, Artificial Sequence
  Description of Artificial Sequence: Synthetic oligonucleotide
tggacacatttgtaatcaaa

SEQ ID NO: 621 - DNA, 20 bp, Artificial Sequence
  Description of Artificial Sequence: Synthetic oligonucleotide
atggacacatttgtaatcaa

SEQ ID NO: 622 - DNA, 20 bp, Artificial Sequence
  Description of Artificial Sequence: Synthetic oligonucleotide
catggacacatttgtaatca

SEQ ID NO: 623 - DNA, 20 bp, Artificial Sequence
  Description of Artificial Sequence: Synthetic oligonucleotide
ccatggacacatttgtaatc

SEQ ID NO: 624 - DNA, 20 bp, Artificial Sequence
  Description of Artificial Sequence: Synthetic oligonucleotide
tccatggacacatttgtaat

SEQ ID NO: 625 - DNA, 20 bp, Artificial Sequence
  Description of Artificial Sequence: Synthetic oligonucleotide
ttccatggacacatttgtaa

SEQ ID NO: 626 - DNA, 20 bp, Artificial Sequence
  Description of Artificial Sequence: Synthetic oligonucleotide
tttccatggacacatttgta

SEQ ID NO: 627 - DNA, 20 bp, Artificial Sequence
  Description of Artificial Sequence: Synthetic oligonucleotide
ttttccatggacacatttgt

SEQ ID NO: 628 - DNA, 20 bp, Artificial Sequence
  Description of Artificial Sequence: Synthetic oligonucleotide
cttttccatggacacatttg

SEQ ID NO: 629 - DNA, 20 bp, Artificial Sequence
  Description of Artificial Sequence: Synthetic oligonucleotide
ccttttccatggacacattt

SEQ ID NO: 630 - DNA, 20 bp, Artificial Sequence
  Description of Artificial Sequence: Synthetic oligonucleotide
accttttccatggacacatt

SEQ ID NO: 631 - DNA, 20 bp, Artificial Sequence
  Description of Artificial Sequence: Synthetic oligonucleotide
gaccttttccatggacacat

SEQ ID NO: 632 - DNA, 20 bp, Artificial Sequence
  Description of Artificial Sequence: Synthetic oligonucleotide
ggaccttttccatggacaca

SEQ ID NO: 633 - DNA, 20 bp, Artificial Sequence
  Description of Artificial Sequence: Synthetic oligonucleotide
aggaccttttccatggacac

SEQ ID NO: 634 - DNA, 20 bp, Artificial Sequence
  Description of Artificial Sequence: Synthetic oligonucleotide
taggaccttttccatggaca

SEQ ID NO: 635 - DNA, 20 bp, Artificial Sequence
  Description of Artificial Sequence: Synthetic oligonucleotide
gtaggaccttttccatggac

SEQ ID NO: 636 - DNA, 20 bp, Artificial Sequence
  Description of Artificial Sequence: Synthetic oligonucleotide
agtaggaccttttccatgga

SEQ ID NO: 637 - DNA, 20 bp, Artificial Sequence
  Description of Artificial Sequence: Synthetic oligonucleotide
cagtaggaccttttccatgg

SEQ ID NO: 638 - DNA, 20 bp, Artificial Sequence
  Description of Artificial Sequence: Synthetic oligonucleotide
tcagtaggaccttttccatg

SEQ ID NO: 639 - DNA, 20 bp, Artificial Sequence
  Description of Artificial Sequence: Synthetic oligonucleotide
ctcagtaggaccttttccat

SEQ ID NO: 640 - DNA, 20 bp, Artificial Sequence
  Description of Artificial Sequence: Synthetic oligonucleotide
gctcagtaggaccttttcca

SEQ ID NO: 641 - DNA, 20 bp, Artificial Sequence
  Description of Artificial Sequence: Synthetic oligonucleotide
tgctcagtaggaccttttcc

SEQ ID NO: 642 - DNA, 20 bp, Artificial Sequence
  Description of Artificial Sequence: Synthetic oligonucleotide
ctgctcagtaggaccttttc

SEQ ID NO: 643 - DNA, 20 bp, Artificial Sequence
  Description of Artificial Sequence: Synthetic oligonucleotide
gctgctcagtaggacctttt

SEQ ID NO: 644 - DNA, 20 bp, Artificial Sequence
  Description of Artificial Sequence: Synthetic oligonucleotide
agctgctcagtaggaccttt

SEQ ID NO: 645 - DNA, 20 bp, Artificial Sequence
  Description of Artificial Sequence: Synthetic oligonucleotide
aagctgctcagtaggacctt

SEQ ID NO: 646 - DNA, 20 bp, Artificial Sequence
  Description of Artificial Sequence: Synthetic oligonucleotide
caagctgctcagtaggacct

SEQ ID NO: 647 - DNA, 20 bp, Artificial Sequence
  Description of Artificial Sequence: Synthetic oligonucleotide
acaagctgctcagtaggacc

SEQ ID NO: 648 - DNA, 20 bp, Artificial Sequence
  Description of Artificial Sequence: Synthetic oligonucleotide
gacaagctgctcagtaggac

SEQ ID NO: 649 - DNA, 20 bp, Artificial Sequence
  Description of Artificial Sequence: Synthetic oligonucleotide
agacaagctgctcagtagga

SEQ ID NO: 650 - DNA, 20 bp, Artificial Sequence
  Description of Artificial Sequence: Synthetic oligonucleotide
gagacaagctgctcagtagg

SEQ ID NO: 651 - DNA, 20 bp, Artificial Sequence
  Description of Artificial Sequence: Synthetic oligonucleotide
tgagacaagctgctcagtag

SEQ ID NO: 652 - DNA, 20 bp, Artificial Sequence
  Description of Artificial Sequence: Synthetic oligonucleotide
gtgagacaagctgctcagta

SEQ ID NO: 653 - DNA, 20 bp, Artificial Sequence
  Description of Artificial Sequence: Synthetic oligonucleotide
ggtgagacaagctgctcagt

SEQ ID NO: 654 - DNA, 20 bp, Artificial Sequence
  Description of Artificial Sequence: Synthetic oligonucleotide
tggtgagacaagctgctcag

SEQ ID NO: 655 - DNA, 20 bp, Artificial Sequence
  Description of Artificial Sequence: Synthetic oligonucleotide
ctggtgagacaagctgctca

SEQ ID NO: 656 - DNA, 20 bp, Artificial Sequence
  Description of Artificial Sequence: Synthetic oligonucleotide
tctggtgagacaagctgctc

SEQ ID NO: 657 - DNA, 20 bp, Artificial Sequence
  Description of Artificial Sequence: Synthetic oligonucleotide
ctctggtgagacaagctgct

SEQ ID NO: 658 - DNA, 20 bp, Artificial Sequence
  Description of Artificial Sequence: Synthetic oligonucleotide
gctctggtgagacaagctgc

SEQ ID NO: 659 - DNA, 20 bp, Artificial Sequence
  Description of Artificial Sequence: Synthetic oligonucleotide
ggctctggtgagacaagctg

SEQ ID NO: 660 - DNA, 20 bp, Artificial Sequence
  Description of Artificial Sequence: Synthetic oligonucleotide
aggctctggtgagacaagct

SEQ ID NO: 661 - DNA, 20 bp, Artificial Sequence
  Description of Artificial Sequence: Synthetic oligonucleotide
caggctctggtgagacaagc

SEQ ID NO: 662 - DNA, 20 bp, Artificial Sequence
  Description of Artificial Sequence: Synthetic oligonucleotide
tcaggctctggtgagacaag

SEQ ID NO: 663 - DNA, 20 bp, Artificial Sequence
  Description of Artificial Sequence: Synthetic oligonucleotide
ttcaggctctggtgagacaa

SEQ ID NO: 664 - DNA, 20 bp, Artificial Sequence
  Description of Artificial Sequence: Synthetic oligonucleotide
cttcaggctctggtgagaca

SEQ ID NO: 665 - DNA, 20 bp, Artificial Sequence
  Description of Artificial Sequence: Synthetic oligonucleotide
acttcaggctctggtgagac

SEQ ID NO: 666 - DNA, 20 bp, Artificial Sequence
  Description of Artificial Sequence: Synthetic oligonucleotide
gacttcaggctctggtgaga

SEQ ID NO: 667 - DNA, 20 bp, Artificial Sequence
  Description of Artificial Sequence: Synthetic oligonucleotide
ggacttcaggctctggtgag

SEQ ID NO: 668 - DNA, 20 bp, Artificial Sequence
  Description of Artificial Sequence: Synthetic oligonucleotide
tggacttcaggctctggtga

SEQ ID NO: 669 - DNA, 20 bp, Artificial Sequence
  Description of Artificial Sequence: Synthetic oligonucleotide
atggacttcaggctctggtg

SEQ ID NO: 670 - DNA, 20 bp, Artificial Sequence
  Description of Artificial Sequence: Synthetic oligonucleotide
catggacttcaggctctggt

SEQ ID NO: 671 - DNA, 20 bp, Artificial Sequence
  Description of Artificial Sequence: Synthetic oligonucleotide
tcatggacttcaggctctgg

SEQ ID NO: 672 - DNA, 20 bp, Artificial Sequence
  Description of Artificial Sequence: Synthetic oligonucleotide
atcatggacttcaggctctg

SEQ ID NO: 673 - DNA, 20 bp, Artificial Sequence
  Description of Artificial Sequence: Synthetic oligonucleotide
tatcatggacttcaggctct

SEQ ID NO: 674 - DNA, 20 bp, Artificial Sequence
  Description of Artificial Sequence: Synthetic oligonucleotide
atatcatggacttcaggctc

SEQ ID NO: 675 - DNA, 20 bp, Artificial Sequence
  Description of Artificial Sequence: Synthetic oligonucleotide
aatatcatggacttcaggct

SEQ ID NO: 676 - DNA, 20 bp, Artificial Sequence
  Description of Artificial Sequence: Synthetic oligonucleotide
caatatcatggacttcaggc

SEQ ID NO: 677 - DNA, 20 bp, Artificial Sequence
  Description of Artificial Sequence: Synthetic oligonucleotide
tcaatatcatggacttcagg

SEQ ID NO: 678 - DNA, 20 bp, Artificial Sequence
  Description of Artificial Sequence: Synthetic oligonucleotide
ttcaatatcatggacttcag

SEQ ID NO: 679 - DNA, 20 bp, Artificial Sequence
  Description of Artificial Sequence: Synthetic oligonucleotide
tttcaatatcatggacttca

SEQ ID NO: 680 - DNA, 20 bp, Artificial Sequence
  Description of Artificial Sequence: Synthetic oligonucleotide
ctttcaatatcatggacttc

SEQ ID NO: 681 - DNA, 20 bp, Artificial Sequence
  Description of Artificial Sequence: Synthetic oligonucleotide
tctttcaatatcatggactt

SEQ ID NO: 682 - DNA, 20 bp, Artificial Sequence
  Description of Artificial Sequence: Synthetic oligonucleotide
atctttcaatatcatggact

SEQ ID NO: 683 - DNA, 20 bp, Artificial Sequence
  Description of Artificial Sequence: Synthetic oligonucleotide
gatctttcaatatcatggac

SEQ ID NO: 684 - DNA, 20 bp, Artificial Sequence
  Description of Artificial Sequence: Synthetic oligonucleotide
agatctttcaatatcatgga

SEQ ID NO: 685 - DNA, 20 bp, Artificial Sequence
  Description of Artificial Sequence: Synthetic oligonucleotide
cagatctttcaatatcatgg

SEQ ID NO: 686 - DNA, 20 bp, Artificial Sequence
  Description of Artificial Sequence: Synthetic oligonucleotide
tcagatctttcaatatcatg

SEQ ID NO: 687 - DNA, 20 bp, Artificial Sequence
  Description of Artificial Sequence: Synthetic oligonucleotide
ttcagatctttcaatatcat

SEQ ID NO: 688 - DNA, 20 bp, Artificial Sequence
  Description of Artificial Sequence: Synthetic oligonucleotide
cttcagatctttcaatatca

SEQ ID NO: 689 - DNA, 20 bp, Artificial Sequence
  Description of Artificial Sequence: Synthetic oligonucleotide
tcttcagatctttcaatatc

SEQ ID NO: 690 - DNA, 20 bp, Artificial Sequence
  Description of Artificial Sequence: Synthetic oligonucleotide
ttcttcagatctttcaatat

SEQ ID NO: 691 - DNA, 20 bp, Artificial Sequence
  Description of Artificial Sequence: Synthetic oligonucleotide
cttcttcagatctttcaata

SEQ ID NO: 692 - DNA, 20 bp, Artificial Sequence
  Description of Artificial Sequence: Synthetic oligonucleotide
tcttcttcagatctttcaat

SEQ ID NO: 693 - DNA, 20 bp, Artificial Sequence
  Description of Artificial Sequence: Synthetic oligonucleotide
atcttcttcagatctttcaa

SEQ ID NO: 694 - DNA, 20 bp, Artificial Sequence
  Description of Artificial Sequence: Synthetic oligonucleotide
catcttcttcagatctttca

SEQ ID NO: 695 - DNA, 20 bp, Artificial Sequence
  Description of Artificial Sequence: Synthetic oligonucleotide
tcatcttcttcagatctttc

SEQ ID NO: 696 - DNA, 20 bp, Artificial Sequence
  Description of Artificial Sequence: Synthetic oligonucleotide
atcatcttcttcagatcttt

SEQ ID NO: 697 - DNA, 20 bp, Artificial Sequence
  Description of Artificial Sequence: Synthetic oligonucleotide
gatcatcttcttcagatctt

SEQ ID NO: 698 - DNA, 20 bp, Artificial Sequence
  Description of Artificial Sequence: Synthetic oligonucleotide
tgatcatcttcttcagatct

SEQ ID NO: 699 - DNA, 20 bp, Artificial Sequence
  Description of Artificial Sequence: Synthetic oligonucleotide
ctgatcatcttcttcagatc

SEQ ID NO: 700 - DNA, 20 bp, Artificial Sequence
  Description of Artificial Sequence: Synthetic oligonucleotide
actgatcatcttcttcagat

SEQ ID NO: 701 - DNA, 20 bp, Artificial Sequence
  Description of Artificial Sequence: Synthetic oligonucleotide
aactgatcatcttcttcaga

SEQ ID NO: 702 - DNA, 20 bp, Artificial Sequence
  Description of Artificial Sequence: Synthetic oligonucleotide
gaactgatcatcttcttcag

SEQ ID NO: 703 - DNA, 20 bp, Artificial Sequence
  Description of Artificial Sequence: Synthetic oligonucleotide
tgaactgatcatcttcttca

SEQ ID NO: 704 - DNA, 20 bp, Artificial Sequence
  Description of Artificial Sequence: Synthetic oligonucleotide
atgaactgatcatcttcttc

SEQ ID NO: 705 - DNA, 20 bp, Artificial Sequence
  Description of Artificial Sequence: Synthetic oligonucleotide
aatgaactgatcatcttctt

SEQ ID NO: 706 - DNA, 20 bp, Artificial Sequence
  Description of Artificial Sequence: Synthetic oligonucleotide
taatgaactgatcatcttct

SEQ ID NO: 707 - DNA, 20 bp, Artificial Sequence
  Description of Artificial Sequence: Synthetic oligonucleotide
ataatgaactgatcatcttc

SEQ ID NO: 708 - DNA, 20 bp, Artificial Sequence
  Description of Artificial Sequence: Synthetic oligonucleotide
gataatgaactgatcatctt

SEQ ID NO: 709 - DNA, 20 bp, Artificial Sequence
  Description of Artificial Sequence: Synthetic oligonucleotide
ggataatgaactgatcatct

SEQ ID NO: 710 - DNA, 20 bp, Artificial Sequence
  Description of Artificial Sequence: Synthetic oligonucleotide
aggataatgaactgatcatc

SEQ ID NO: 711 - DNA, 20 bp, Artificial Sequence
  Description of Artificial Sequence: Synthetic oligonucleotide
aaggataatgaactgatcat

SEQ ID NO: 712 - DNA, 20 bp, Artificial Sequence
  Description of Artificial Sequence: Synthetic oligonucleotide
caaggataatgaactgatca

SEQ ID NO: 713 - DNA, 20 bp, Artificial Sequence
  Description of Artificial Sequence: Synthetic oligonucleotide
gcaaggataatgaactgatc

SEQ ID NO: 714 - DNA, 20 bp, Artificial Sequence
  Description of Artificial Sequence: Synthetic oligonucleotide
tgcaaggataatgaactgat

SEQ ID NO: 715 - DNA, 20 bp, Artificial Sequence
  Description of Artificial Sequence: Synthetic oligonucleotide
atgcaaggataatgaactga

SEQ ID NO: 716 - DNA, 20 bp, Artificial Sequence
  Description of Artificial Sequence: Synthetic oligonucleotide
catgcaaggataatgaactg

SEQ ID NO: 717 - DNA, 20 bp, Artificial Sequence
  Description of Artificial Sequence: Synthetic oligonucleotide
acatgcaaggataatgaact

SEQ ID NO: 718 - DNA, 20 bp, Artificial Sequence
  Description of Artificial Sequence: Synthetic oligonucleotide
cacatgcaaggataatgaac

SEQ ID NO: 719 - DNA, 20 bp, Artificial Sequence
  Description of Artificial Sequence: Synthetic oligonucleotide
tcacatgcaaggataatgaa

SEQ ID NO: 720 - DNA, 20 bp, Artificial Sequence
  Description of Artificial Sequence: Synthetic oligonucleotide
atcacatgcaaggataatga

SEQ ID NO: 721 - DNA, 20 bp, Artificial Sequence
  Description of Artificial Sequence: Synthetic oligonucleotide
catcacatgcaaggataatg

SEQ ID NO: 722 - DNA, 20 bp, Artificial Sequence
  Description of Artificial Sequence: Synthetic oligonucleotide
ccatcacatgcaaggataat

SEQ ID NO: 723 - DNA, 20 bp, Artificial Sequence
  Description of Artificial Sequence: Synthetic oligonucleotide
accatcacatgcaaggataa

SEQ ID NO: 724 - DNA, 20 bp, Artificial Sequence
  Description of Artificial Sequence: Synthetic oligonucleotide
taccatcacatgcaaggata

SEQ ID NO: 725 - DNA, 20 bp, Artificial Sequence
  Description of Artificial Sequence: Synthetic oligonucleotide
ataccatcacatgcaaggat

SEQ ID NO: 726 - DNA, 20 bp, Artificial Sequence
  Description of Artificial Sequence: Synthetic oligonucleotide
gataccatcacatgcaagga

SEQ ID NO: 727 - DNA, 20 bp, Artificial Sequence
  Description of Artificial Sequence: Synthetic oligonucleotide
agataccatcacatgcaagg

SEQ ID NO: 728 - DNA, 20 bp, Artificial Sequence
  Description of Artificial Sequence: Synthetic oligonucleotide
cagataccatcacatgcaag

SEQ ID NO: 729 - DNA, 20 bp, Artificial Sequence
  Description of Artificial Sequence: Synthetic oligonucleotide
ccagataccatcacatgcaa

SEQ ID NO: 730 - DNA, 20 bp, Artificial Sequence
  Description of Artificial Sequence: Synthetic oligonucleotide
cccagataccatcacatgca

SEQ ID NO: 731 - DNA, 20 bp, Artificial Sequence
  Description of Artificial Sequence: Synthetic oligonucleotide
tcccagataccatcacatgc

SEQ ID NO: 732 - DNA, 20 bp, Artificial Sequence
  Description of Artificial Sequence: Synthetic oligonucleotide
atcccagataccatcacatg

SEQ ID NO: 733 - DNA, 20 bp, Artificial Sequence
  Description of Artificial Sequence: Synthetic oligonucleotide
catcccagataccatcacat

SEQ ID NO: 734 - DNA, 20 bp, Artificial Sequence
  Description of Artificial Sequence: Synthetic oligonucleotide
acatcccagataccatcaca

SEQ ID NO: 735 - DNA, 20 bp, Artificial Sequence
  Description of Artificial Sequence: Synthetic oligonucleotide
aacatcccagataccatcac

SEQ ID NO: 736 - DNA, 20 bp, Artificial Sequence
  Description of Artificial Sequence: Synthetic oligonucleotide
taacatcccagataccatca

SEQ ID NO: 737 - DNA, 20 bp, Artificial Sequence
  Description of Artificial Sequence: Synthetic oligonucleotide
ataacatcccagataccatc

SEQ ID NO: 738 - DNA, 20 bp, Artificial Sequence
  Description of Artificial Sequence: Synthetic oligonucleotide
cataacatcccagataccat

SEQ ID NO: 739 - DNA, 20 bp, Artificial Sequence
  Description of Artificial Sequence: Synthetic oligonucleotide
ccataacatcccagatacca

SEQ ID NO: 740 - DNA, 20 bp, Artificial Sequence
  Description of Artificial Sequence: Synthetic oligonucleotide
cccataacatcccagatacc

SEQ ID NO: 741 - DNA, 20 bp, Artificial Sequence
  Description of Artificial Sequence: Synthetic oligonucleotide
tcccataacatcccagatac

SEQ ID NO: 742 - DNA, 20 bp, Artificial Sequence
  Description of Artificial Sequence: Synthetic oligonucleotide
ttcccataacatcccagata

SEQ ID NO: 743 - DNA, 20 bp, Artificial Sequence
  Description of Artificial Sequence: Synthetic oligonucleotide
tttcccataacatcccagat

SEQ ID NO: 744 - DNA, 20 bp, Artificial Sequence
  Description of Artificial Sequence: Synthetic oligonucleotide
atttcccataacatcccaga

SEQ ID NO: 745 - DNA, 20 bp, Artificial Sequence
  Description of Artificial Sequence: Synthetic oligonucleotide
catttcccataacatcccag

SEQ ID NO: 746 - DNA, 20 bp, Artificial Sequence
  Description of Artificial Sequence: Synthetic oligonucleotide
tcatttcccataacatccca

SEQ ID NO: 747 - DNA, 20 bp, Artificial Sequence
  Description of Artificial Sequence: Synthetic oligonucleotide
ttcatttcccataacatccc

SEQ ID NO: 748 - DNA, 20 bp, Artificial Sequence
  Description of Artificial Sequence: Synthetic oligonucleotide
cttcatttcccataacatcc

SEQ ID NO: 749 - DNA, 20 bp, Artificial Sequence
  Description of Artificial Sequence: Synthetic oligonucleotide
tcttcatttcccataacatc

SEQ ID NO: 750 - DNA, 20 bp, Artificial Sequence
  Description of Artificial Sequence: Synthetic oligonucleotide
ctcttcatttcccataacat

SEQ ID NO: 751 - DNA, 20 bp, Artificial Sequence
  Description of Artificial Sequence: Synthetic oligonucleotide
gctcttcatttcccataaca

SEQ ID NO: 752 - DNA, 20 bp, Artificial Sequence
  Description of Artificial Sequence: Synthetic oligonucleotide
agctcttcatttcccataac

SEQ ID NO: 753 - DNA, 20 bp, Artificial Sequence
  Description of Artificial Sequence: Synthetic oligonucleotide
gagctcttcatttcccataa

SEQ ID NO: 754 - DNA, 20 bp, Artificial Sequence
  Description of Artificial Sequence: Synthetic oligonucleotide
agagctcttcatttcccata

SEQ ID NO: 755 - DNA, 20 bp, Artificial Sequence
  Description of Artificial Sequence: Synthetic oligonucleotide
cagagctcttcatttcccat

SEQ ID NO: 756 - DNA, 20 bp, Artificial Sequence
  Description of Artificial Sequence: Synthetic oligonucleotide
acagagctcttcatttccca

SEQ ID NO: 757 - DNA, 20 bp, Artificial Sequence
  Description of Artificial Sequence: Synthetic oligonucleotide
cacagagctcttcatttccc

SEQ ID NO: 758 - DNA, 20 bp, Artificial Sequence
  Description of Artificial Sequence: Synthetic oligonucleotide
tcacagagctcttcatttcc

SEQ ID NO: 759 - DNA, 20 bp, Artificial Sequence
  Description of Artificial Sequence: Synthetic oligonucleotide
atcacagagctcttcatttc

SEQ ID NO: 760 - DNA, 20 bp, Artificial Sequence
  Description of Artificial Sequence: Synthetic oligonucleotide
aatcacagagctcttcattt

SEQ ID NO: 761 - DNA, 20 bp, Artificial Sequence
  Description of Artificial Sequence: Synthetic oligonucleotide
aaatcacagagctcttcatt

SEQ ID NO: 762 - DNA, 20 bp, Artificial Sequence
  Description of Artificial Sequence: Synthetic oligonucleotide
aaaatcacagagctcttcat

SEQ ID NO: 763 - DNA, 20 bp, Artificial Sequence
  Description of Artificial Sequence: Synthetic oligonucleotide
caaaatcacagagctcttca

SEQ ID NO: 764 - DNA, 20 bp, Artificial Sequence
  Description of Artificial Sequence: Synthetic oligonucleotide
acaaaatcacagagctcttc

SEQ ID NO: 765 - DNA, 20 bp, Artificial Sequence
  Description of Artificial Sequence: Synthetic oligonucleotide
tacaaaatcacagagctctt

SEQ ID NO: 766 - DNA, 20 bp, Artificial Sequence
  Description of Artificial Sequence: Synthetic oligonucleotide
ttacaaaatcacagagctct

SEQ ID NO: 767 - DNA, 20 bp, Artificial Sequence
  Description of Artificial Sequence: Synthetic oligonucleotide
cttacaaaatcacagagctc

SEQ ID NO: 768 - DNA, 20 bp, Artificial Sequence
  Description of Artificial Sequence: Synthetic oligonucleotide
tcttacaaaatcacagagct

SEQ ID NO: 769 - DNA, 20 bp, Artificial Sequence
  Description of Artificial Sequence: Synthetic oligonucleotide
atcttacaaaatcacagagc

SEQ ID NO: 770 - DNA, 20 bp, Artificial Sequence
  Description of Artificial Sequence: Synthetic oligonucleotide
gatcttacaaaatcacagag

SEQ ID NO: 771 - DNA, 20 bp, Artificial Sequence
  Description of Artificial Sequence: Synthetic oligonucleotide
ggatcttacaaaatcacaga

SEQ ID NO: 772 - DNA, 20 bp, Artificial Sequence
  Description of Artificial Sequence: Synthetic oligonucleotide
tggatcttacaaaatcacag

SEQ ID NO: 773 - DNA, 20 bp, Artificial Sequence
  Description of Artificial Sequence: Synthetic oligonucleotide
ctggatcttacaaaatcaca

SEQ ID NO: 774 - DNA, 20 bp, Artificial Sequence
  Description of Artificial Sequence: Synthetic oligonucleotide
tctggatcttacaaaatcac

SEQ ID NO: 775 - DNA, 20 bp, Artificial Sequence
  Description of Artificial Sequence: Synthetic oligonucleotide
gtctggatcttacaaaatca

SEQ ID NO: 776 - DNA, 20 bp, Artificial Sequence
  Description of Artificial Sequence: Synthetic oligonucleotide
agtctggatcttacaaaatc

SEQ ID NO: 777 - DNA, 20 bp, Artificial Sequence
  Description of Artificial Sequence: Synthetic oligonucleotide
aagtctggatcttacaaaat

SEQ ID NO: 778 - DNA, 20 bp, Artificial Sequence
  Description of Artificial Sequence: Synthetic oligonucleotide
caagtctggatcttacaaaa

SEQ ID NO: 779 - DNA, 20 bp, Artificial Sequence
  Description of Artificial Sequence: Synthetic oligonucleotide
tcaagtctggatcttacaaa

SEQ ID NO: 780 - DNA, 20 bp, Artificial Sequence
  Description of Artificial Sequence: Synthetic oligonucleotide
ttcaagtctggatcttacaa

SEQ ID NO: 781 - DNA, 20 bp, Artificial Sequence
  Description of Artificial Sequence: Synthetic oligonucleotide
cttcaagtctggatcttaca

SEQ ID NO: 782 - DNA, 20 bp, Artificial Sequence
  Description of Artificial Sequence: Synthetic oligonucleotide
acttcaagtctggatcttac

SEQ ID NO: 783 - DNA, 20 bp, Artificial Sequence
  Description of Artificial Sequence: Synthetic oligonucleotide
gacttcaagtctggatctta

SEQ ID NO: 784 - DNA, 20 bp, Artificial Sequence
  Description of Artificial Sequence: Synthetic oligonucleotide
tgacttcaagtctggatctt

SEQ ID NO: 785 - DNA, 20 bp, Artificial Sequence
  Description of Artificial Sequence: Synthetic oligonucleotide
gtgacttcaagtctggatct

SEQ ID NO: 786 - DNA, 20 bp, Artificial Sequence
  Description of Artificial Sequence: Synthetic oligonucleotide
agtgacttcaagtctggatc

SEQ ID NO: 787 - DNA, 20 bp, Artificial Sequence
  Description of Artificial Sequence: Synthetic oligonucleotide
cagtgacttcaagtctggat

SEQ ID NO: 788 - DNA, 20 bp, Artificial Sequence
  Description of Artificial Sequence: Synthetic oligonucleotide
tcagtgacttcaagtctgga

SEQ ID NO: 789 - DNA, 20 bp, Artificial Sequence
  Description of Artificial Sequence: Synthetic oligonucleotide
atcagtgacttcaagtctgg

SEQ ID NO: 790 - DNA, 20 bp, Artificial Sequence
  Description of Artificial Sequence: Synthetic oligonucleotide
catcagtgacttcaagtctg

SEQ ID NO: 791 - DNA, 20 bp, Artificial Sequence
  Description of Artificial Sequence: Synthetic oligonucleotide
tcatcagtgacttcaagtct

SEQ ID NO: 792 - DNA, 20 bp, Artificial Sequence
  Description of Artificial Sequence: Synthetic oligonucleotide
gtcatcagtgacttcaagtc

SEQ ID NO: 793 - DNA, 20 bp, Artificial Sequence
  Description of Artificial Sequence: Synthetic oligonucleotide
ggtcatcagtgacttcaagt

SEQ ID NO: 794 - DNA, 20 bp, Artificial Sequence
  Description of Artificial Sequence: Synthetic oligonucleotide
aggtcatcagtgacttcaag

SEQ ID NO: 795 - DNA, 20 bp, Artificial Sequence
  Description of Artificial Sequence: Synthetic oligonucleotide
aaggtcatcagtgacttcaa

SEQ ID NO: 796 - DNA, 20 bp, Artificial Sequence
  Description of Artificial Sequence: Synthetic oligonucleotide
caaggtcatcagtgacttca

SEQ ID NO: 797 - DNA, 20 bp, Artificial Sequence
  Description of Artificial Sequence: Synthetic oligonucleotide
tcaaggtcatcagtgacttc

SEQ ID NO: 798 - DNA, 20 bp, Artificial Sequence
  Description of Artificial Sequence: Synthetic oligonucleotide
ctcaaggtcatcagtgactt

SEQ ID NO: 799 - DNA, 20 bp, Artificial Sequence
  Description of Artificial Sequence: Synthetic oligonucleotide
tctcaaggtcatcagtgact

SEQ ID NO: 800 - DNA, 20 bp, Artificial Sequence
  Description of Artificial Sequence: Synthetic oligonucleotide
ttctcaaggtcatcagtgac

SEQ ID NO: 801 - DNA, 20 bp, Artificial Sequence
  Description of Artificial Sequence: Synthetic oligonucleotide
tttctcaaggtcatcagtga

SEQ ID NO: 802 - DNA, 20 bp, Artificial Sequence
  Description of Artificial Sequence: Synthetic oligonucleotide
ctttctcaaggtcatcagtg

SEQ ID NO: 803 - DNA, 20 bp, Artificial Sequence
  Description of Artificial Sequence: Synthetic oligonucleotide
actttctcaaggtcatcagt

SEQ ID NO: 804 - DNA, 20 bp, Artificial Sequence
  Description of Artificial Sequence: Synthetic oligonucleotide
aactttctcaaggtcatcag

SEQ ID NO: 805 - DNA, 20 bp, Artificial Sequence
  Description of Artificial Sequence: Synthetic oligonucleotide
aaactttctcaaggtcatca

SEQ ID NO: 806 - DNA, 20 bp, Artificial Sequence
  Description of Artificial Sequence: Synthetic oligonucleotide
caaactttctcaaggtcatc

SEQ ID NO: 807 - DNA, 20 bp, Artificial Sequence
  Description of Artificial Sequence: Synthetic oligonucleotide
gcaaactttctcaaggtcat

SEQ ID NO: 808 - DNA, 20 bp, Artificial Sequence
  Description of Artificial Sequence: Synthetic oligonucleotide
tgcaaactttctcaaggtca

SEQ ID NO: 809 - DNA, 20 bp, Artificial Sequence
  Description of Artificial Sequence: Synthetic oligonucleotide
ttgcaaactttctcaaggtc

SEQ ID NO: 810 - DNA, 20 bp, Artificial Sequence
  Description of Artificial Sequence: Synthetic oligonucleotide
attgcaaactttctcaaggt

SEQ ID NO: 811 - DNA, 20 bp, Artificial Sequence
  Description of Artificial Sequence: Synthetic oligonucleotide
cattgcaaactttctcaagg

SEQ ID NO: 812 - DNA, 20 bp, Artificial Sequence
  Description of Artificial Sequence: Synthetic oligonucleotide
tcattgcaaactttctcaag

SEQ ID NO: 813 - DNA, 20 bp, Artificial Sequence
  Description of Artificial Sequence: Synthetic oligonucleotide
ttcattgcaaactttctcaa

SEQ ID NO: 814 - DNA, 20 bp, Artificial Sequence
  Description of Artificial Sequence: Synthetic oligonucleotide
cttcattgcaaactttctca

SEQ ID NO: 815 - DNA, 20 bp, Artificial Sequence
  Description of Artificial Sequence: Synthetic oligonucleotide
acttcattgcaaactttctc

SEQ ID NO: 816 - DNA, 20 bp, Artificial Sequence
  Description of Artificial Sequence: Synthetic oligonucleotide
tacttcattgcaaactttct

SEQ ID NO: 817 - DNA, 20 bp, Artificial Sequence
  Description of Artificial Sequence: Synthetic oligonucleotide
ctacttcattgcaaactttc

SEQ ID NO: 818 - DNA, 20 bp, Artificial Sequence
  Description of Artificial Sequence: Synthetic oligonucleotide
actacttcattgcaaacttt

SEQ ID NO: 819 - DNA, 20 bp, Artificial Sequence
  Description of Artificial Sequence: Synthetic oligonucleotide
gactacttcattgcaaactt

SEQ ID NO: 820 - DNA, 20 bp, Artificial Sequence
  Description of Artificial Sequence: Synthetic oligonucleotide
cgactacttcattgcaaact

SEQ ID NO: 821 - DNA, 20 bp, Artificial Sequence
  Description of Artificial Sequence: Synthetic oligonucleotide
tcgactacttcattgcaaac

SEQ ID NO: 822 - DNA, 20 bp, Artificial Sequence
  Description of Artificial Sequence: Synthetic oligonucleotide
gtcgactacttcattgcaaa

SEQ ID NO: 823 - DNA, 20 bp, Artificial Sequence
  Description of Artificial Sequence: Synthetic oligonucleotide
tgtcgactacttcattgcaa

SEQ ID NO: 824 - DNA, 20 bp, Artificial Sequence
  Description of Artificial Sequence: Synthetic oligonucleotide
gtgtcgactacttcattgca

SEQ ID NO: 825 - DNA, 20 bp, Artificial Sequence
  Description of Artificial Sequence: Synthetic oligonucleotide
ggtgtcgactacttcattgc

SEQ ID NO: 826 - DNA, 20 bp, Artificial Sequence
  Description of Artificial Sequence: Synthetic oligonucleotide
aggtgtcgactacttcattg

SEQ ID NO: 827 - DNA, 20 bp, Artificial Sequence
  Description of Artificial Sequence: Synthetic oligonucleotide
caggtgtcgactacttcatt

SEQ ID NO: 828 - DNA, 20 bp, Artificial Sequence
  Description of Artificial Sequence: Synthetic oligonucleotide
acaggtgtcgactacttcat

SEQ ID NO: 829 - DNA, 20 bp, Artificial Sequence
  Description of Artificial Sequence: Synthetic oligonucleotide
aacaggtgtcgactacttca

SEQ ID NO: 830 - DNA, 20 bp, Artificial Sequence
  Description of Artificial Sequence: Synthetic oligonucleotide
aaacaggtgtcgactacttc

SEQ ID NO: 831 - DNA, 20 bp, Artificial Sequence
  Description of Artificial Sequence: Synthetic oligonucleotide
caaacaggtgtcgactactt

SEQ ID NO: 832 - DNA, 20 bp, Artificial Sequence
  Description of Artificial Sequence: Synthetic oligonucleotide
acaaacaggtgtcgactact

SEQ ID NO: 833 - DNA, 20 bp, Artificial Sequence
  Description of Artificial Sequence: Synthetic oligonucleotide
tacaaacaggtgtcgactac

SEQ ID NO: 834 - DNA, 20 bp, Artificial Sequence
  Description of Artificial Sequence: Synthetic oligonucleotide
atacaaacaggtgtcgacta

SEQ ID NO: 835 - DNA, 20 bp, Artificial Sequence
  Description of Artificial Sequence: Synthetic oligonucleotide
tatacaaacaggtgtcgact

SEQ ID NO: 836 - DNA, 20 bp, Artificial Sequence
  Description of Artificial Sequence: Synthetic oligonucleotide
ttatacaaacaggtgtcgac

SEQ ID NO: 837 - DNA, 20 bp, Artificial Sequence
  Description of Artificial Sequence: Synthetic oligonucleotide
cttatacaaacaggtgtcga

SEQ ID NO: 838 - DNA, 20 bp, Artificial Sequence
  Description of Artificial Sequence: Synthetic oligonucleotide
ccttatacaaacaggtgtcg

SEQ ID NO: 839 - DNA, 20 bp, Artificial Sequence
  Description of Artificial Sequence: Synthetic oligonucleotide
cccttatacaaacaggtgtc

SEQ ID NO: 840 - DNA, 20 bp, Artificial Sequence
  Description of Artificial Sequence: Synthetic oligonucleotide
tcccttatacaaacaggtgt

SEQ ID NO: 841 - DNA, 20 bp, Artificial Sequence
  Description of Artificial Sequence: Synthetic oligonucleotide
ttcccttatacaaacaggtg

SEQ ID NO: 842 - DNA, 20 bp, Artificial Sequence
  Description of Artificial Sequence: Synthetic oligonucleotide
cttcccttatacaaacaggt

SEQ ID NO: 843 - DNA, 20 bp, Artificial Sequence
  Description of Artificial Sequence: Synthetic oligonucleotide
acttcccttatacaaacagg

SEQ ID NO: 844 - DNA, 20 bp, Artificial Sequence
  Description of Artificial Sequence: Synthetic oligonucleotide
gacttcccttatacaaacag

SEQ ID NO: 845 - DNA, 20 bp, Artificial Sequence
  Description of Artificial Sequence: Synthetic oligonucleotide
cgacttcccttatacaaaca

SEQ ID NO: 846 - DNA, 20 bp, Artificial Sequence
  Description of Artificial Sequence: Synthetic oligonucleotide
tcgacttcccttatacaaac

SEQ ID NO: 847 - DNA, 20 bp, Artificial Sequence
  Description of Artificial Sequence: Synthetic oligonucleotide
ctcgacttcccttatacaaa

SEQ ID NO: 848 - DNA, 20 bp, Artificial Sequence
  Description of Artificial Sequence: Synthetic oligonucleotide
tctcgacttcccttatacaa

SEQ ID NO: 849 - DNA, 20 bp, Artificial Sequence
  Description of Artificial Sequence: Synthetic oligonucleotide
gtctcgacttcccttataca

SEQ ID NO: 850 - DNA, 20 bp, Artificial Sequence
  Description of Artificial Sequence: Synthetic oligonucleotide
tgtctcgacttcccttatac

SEQ ID NO: 851 - DNA, 20 bp, Artificial Sequence
  Description of Artificial Sequence: Synthetic oligonucleotide
ttgtctcgacttcccttata

SEQ ID NO: 852 - DNA, 20 bp, Artificial Sequence
  Description of Artificial Sequence: Synthetic oligonucleotide
gttgtctcgacttcccttat

SEQ ID NO: 853 - DNA, 20 bp, Artificial Sequence
  Description of Artificial Sequence: Synthetic oligonucleotide
tgttgtctcgacttccctta

SEQ ID NO: 854 - DNA, 20 bp, Artificial Sequence
  Description of Artificial Sequence: Synthetic oligonucleotide
atgttgtctcgacttccctt

SEQ ID NO: 855 - DNA, 20 bp, Artificial Sequence
  Description of Artificial Sequence: Synthetic oligonucleotide
catgttgtctcgacttccct

SEQ ID NO: 856 - DNA, 20 bp, Artificial Sequence
  Description of Artificial Sequence: Synthetic oligonucleotide
tcatgttgtctcgacttccc

SEQ ID NO: 857 - DNA, 20 bp, Artificial Sequence
  Description of Artificial Sequence: Synthetic oligonucleotide
ctcatgttgtctcgacttcc

SEQ ID NO: 858 - DNA, 20 bp, Artificial Sequence
  Description of Artificial Sequence: Synthetic oligonucleotide
actcatgttgtctcgacttc

SEQ ID NO: 859 - DNA, 20 bp, Artificial Sequence
  Description of Artificial Sequence: Synthetic oligonucleotide
cactcatgttgtctcgactt

SEQ ID NO: 860 - DNA, 20 bp, Artificial Sequence
  Description of Artificial Sequence: Synthetic oligonucleotide
acactcatgttgtctcgact

SEQ ID NO: 861 - DNA, 20 bp, Artificial Sequence
  Description of Artificial Sequence: Synthetic oligonucleotide
cacactcatgttgtctcgac

SEQ ID NO: 862 - DNA, 20 bp, Artificial Sequence
  Description of Artificial Sequence: Synthetic oligonucleotide
tcacactcatgttgtctcga

SEQ ID NO: 863 - DNA, 20 bp, Artificial Sequence
  Description of Artificial Sequence: Synthetic oligonucleotide
atcacactcatgttgtctcg

SEQ ID NO: 864 - DNA, 20 bp, Artificial Sequence
  Description of Artificial Sequence: Synthetic oligonucleotide
aatcacactcatgttgtctc

SEQ ID NO: 865 - DNA, 20 bp, Artificial Sequence
  Description of Artificial Sequence: Synthetic oligonucleotide
aaatcacactcatgttgtct

SEQ ID NO: 866 - DNA, 20 bp, Artificial Sequence
  Description of Artificial Sequence: Synthetic oligonucleotide
aaaatcacactcatgttgtc

SEQ ID NO: 867 - DNA, 20 bp, Artificial Sequence
  Description of Artificial Sequence: Synthetic oligonucleotide
caaaatcacactcatgttgt

SEQ ID NO: 868 - DNA, 20 bp, Artificial Sequence
  Description of Artificial Sequence: Synthetic oligonucleotide
tcaaaatcacactcatgttg

SEQ ID NO: 869 - DNA, 20 bp, Artificial Sequence
  Description of Artificial Sequence: Synthetic oligonucleotide
atcaaaatcacactcatgtt

SEQ ID NO: 870 - DNA, 20 bp, Artificial Sequence
  Description of Artificial Sequence: Synthetic oligonucleotide
gatcaaaatcacactcatgt

SEQ ID NO: 871 - DNA, 20 bp, Artificial Sequence
  Description of Artificial Sequence: Synthetic oligonucleotide
agatcaaaatcacactcatg

SEQ ID NO: 872 - DNA, 20 bp, Artificial Sequence
  Description of Artificial Sequence: Synthetic oligonucleotide
cagatcaaaatcacactcat

SEQ ID NO: 873 - DNA, 20 bp, Artificial Sequence
  Description of Artificial Sequence: Synthetic oligonucleotide
acagatcaaaatcacactca

SEQ ID NO: 874 - DNA, 20 bp, Artificial Sequence
  Description of Artificial Sequence: Synthetic oligonucleotide
aacagatcaaaatcacactc

SEQ ID NO: 875 - DNA, 20 bp, Artificial Sequence
  Description of Artificial Sequence: Synthetic oligonucleotide
aaacagatcaaaatcacact

SEQ ID NO: 876 - DNA, 20 bp, Artificial Sequence
  Description of Artificial Sequence: Synthetic oligonucleotide
aaaacagatcaaaatcacac

SEQ ID NO: 877 - DNA, 20 bp, Artificial Sequence
  Description of Artificial Sequence: Synthetic oligonucleotide
gaaaacagatcaaaatcaca

SEQ ID NO: 878 - DNA, 20 bp, Artificial Sequence
  Description of Artificial Sequence: Synthetic oligonucleotide
ggaaaacagatcaaaatcac

SEQ ID NO: 879 - DNA, 20 bp, Artificial Sequence
  Description of Artificial Sequence: Synthetic oligonucleotide
tggaaaacagatcaaaatca

SEQ ID NO: 880 - DNA, 20 bp, Artificial Sequence
  Description of Artificial Sequence: Synthetic oligonucleotide
ttggaaaacagatcaaaatc

SEQ ID NO: 881 - DNA, 20 bp, Artificial Sequence
  Description of Artificial Sequence: Synthetic oligonucleotide
tttggaaaacagatcaaaat

SEQ ID NO: 882 - DNA, 20 bp, Artificial Sequence
  Description of Artificial Sequence: Synthetic oligonucleotide
atttggaaaacagatcaaaa

SEQ ID NO: 883 - DNA, 20 bp, Artificial Sequence
  Description of Artificial Sequence: Synthetic oligonucleotide
catttggaaaacagatcaaa

SEQ ID NO: 884 - DNA, 20 bp, Artificial Sequence
  Description of Artificial Sequence: Synthetic oligonucleotide
gcatttggaaaacagatcaa

SEQ ID NO: 885 - DNA, 20 bp, Artificial Sequence
  Description of Artificial Sequence: Synthetic oligonucleotide
tgcatttggaaaacagatca

SEQ ID NO: 886 - DNA, 20 bp, Artificial Sequence
  Description of Artificial Sequence: Synthetic oligonucleotide
gtgcatttggaaaacagatc

SEQ ID NO: 887 - DNA, 20 bp, Artificial Sequence
  Description of Artificial Sequence: Synthetic oligonucleotide
ggtgcatttggaaaacagat

SEQ ID NO: 888 - DNA, 20 bp, Artificial Sequence
  Description of Artificial Sequence: Synthetic oligonucleotide
gggtgcatttggaaaacaga

SEQ ID NO: 889 - DNA, 20 bp, Artificial Sequence
  Description of Artificial Sequence: Synthetic oligonucleotide
tgggtgcatttggaaaacag

SEQ ID NO: 890 - DNA, 20 bp, Artificial Sequence
  Description of Artificial Sequence: Synthetic oligonucleotide
ttgggtgcatttggaaaaca

SEQ ID NO: 891 - DNA, 20 bp, Artificial Sequence
  Description of Artificial Sequence: Synthetic oligonucleotide
tttgggtgcatttggaaaac

SEQ ID NO: 892 - DNA, 20 bp, Artificial Sequence
  Description of Artificial Sequence: Synthetic oligonucleotide
ctttgggtgcatttggaaaa

SEQ ID NO: 893 - DNA, 20 bp, Artificial Sequence
  Description of Artificial Sequence: Synthetic oligonucleotide
actttgggtgcatttggaaa

SEQ ID NO: 894 - DNA, 20 bp, Artificial Sequence
  Description of Artificial Sequence: Synthetic oligonucleotide
tactttgggtgcatttggaa

SEQ ID NO: 895 - DNA, 20 bp, Artificial Sequence
  Description of Artificial Sequence: Synthetic oligonucleotide
atactttgggtgcatttgga

SEQ ID NO: 896 - DNA, 20 bp, Artificial Sequence
  Description of Artificial Sequence: Synthetic oligonucleotide
gatactttgggtgcatttgg

SEQ ID NO: 897 - DNA, 20 bp, Artificial Sequence
  Description of Artificial Sequence: Synthetic oligonucleotide
cgatactttgggtgcatttg

SEQ ID NO: 898 - DNA, 20 bp, Artificial Sequence
  Description of Artificial Sequence: Synthetic oligonucleotide
gcgatactttgggtgcattt

SEQ ID NO: 899 - DNA, 20 bp, Artificial Sequence
  Description of Artificial Sequence: Synthetic oligonucleotide
ggcgatactttgggtgcatt

SEQ ID NO: 900 - DNA, 20 bp, Artificial Sequence
  Description of Artificial Sequence: Synthetic oligonucleotide
tggcgatactttgggtgcat

SEQ ID NO: 901 - DNA, 20 bp, Artificial Sequence
  Description of Artificial Sequence: Synthetic oligonucleotide
ctggcgatactttgggtgca

SEQ ID NO: 902 - DNA, 20 bp, Artificial Sequence
  Description of Artificial Sequence: Synthetic oligonucleotide
tctggcgatactttgggtgc

SEQ ID NO: 903 - DNA, 20 bp, Artificial Sequence
  Description of Artificial Sequence: Synthetic oligonucleotide
ttctggcgatactttgggtg

SEQ ID NO: 904 - DNA, 20 bp, Artificial Sequence
  Description of Artificial Sequence: Synthetic oligonucleotide
cttctggcgatactttgggt

SEQ ID NO: 905 - DNA, 20 bp, Artificial Sequence
  Description of Artificial Sequence: Synthetic oligonucleotide
gcttctggcgatactttggg

SEQ ID NO: 906 - DNA, 20 bp, Artificial Sequence
  Description of Artificial Sequence: Synthetic oligonucleotide
tgcttctggcgatactttgg

SEQ ID NO: 907 - DNA, 20 bp, Artificial Sequence
  Description of Artificial Sequence: Synthetic oligonucleotide
ctgcttctggcgatactttg

SEQ ID NO: 908 - DNA, 20 bp, Artificial Sequence
  Description of Artificial Sequence: Synthetic oligonucleotide
actgcttctggcgatacttt

SEQ ID NO: 909 - DNA, 20 bp, Artificial Sequence
  Description of Artificial Sequence: Synthetic oligonucleotide
cactgcttctggcgatactt

SEQ ID NO: 910 - DNA, 20 bp, Artificial Sequence
  Description of Artificial Sequence: Synthetic oligonucleotide
tcactgcttctggcgatact

SEQ ID NO: 911 - DNA, 20 bp, Artificial Sequence
  Description of Artificial Sequence: Synthetic oligonucleotide
ttcactgcttctggcgatac

SEQ ID NO: 912 - DNA, 20 bp, Artificial Sequence
  Description of Artificial Sequence: Synthetic oligonucleotide
cttcactgcttctggcgata

SEQ ID NO: 913 - DNA, 20 bp, Artificial Sequence
  Description of Artificial Sequence: Synthetic oligonucleotide
tcttcactgcttctggcgat

SEQ ID NO: 914 - DNA, 20 bp, Artificial Sequence
  Description of Artificial Sequence: Synthetic oligonucleotide
ttcttcactgcttctggcga

SEQ ID NO: 915 - DNA, 20 bp, Artificial Sequence
  Description of Artificial Sequence: Synthetic oligonucleotide
cttcttcactgcttctggcg

SEQ ID NO: 916 - DNA, 20 bp, Artificial Sequence
  Description of Artificial Sequence: Synthetic oligonucleotide
ccttcttcactgcttctggc

SEQ ID NO: 917 - DNA, 20 bp, Artificial Sequence
  Description of Artificial Sequence: Synthetic oligonucleotide
tccttcttcactgcttctgg

SEQ ID NO: 918 - DNA, 20 bp, Artificial Sequence
  Description of Artificial Sequence: Synthetic oligonucleotide
ctccttcttcactgcttctg

SEQ ID NO: 919 - DNA, 20 bp, Artificial Sequence
  Description of Artificial Sequence: Synthetic oligonucleotide
cctccttcttcactgcttct

SEQ ID NO: 920 - DNA, 20 bp, Artificial Sequence
  Description of Artificial Sequence: Synthetic oligonucleotide
gcctccttcttcactgcttc

SEQ ID NO: 921 - DNA, 20 bp, Artificial Sequence
  Description of Artificial Sequence: Synthetic oligonucleotide
tgcctccttcttcactgctt

SEQ ID NO: 922 - DNA, 20 bp, Artificial Sequence
  Description of Artificial Sequence: Synthetic oligonucleotide
ctgcctccttcttcactgct

SEQ ID NO: 923 - DNA, 20 bp, Artificial Sequence
  Description of Artificial Sequence: Synthetic oligonucleotide
tctgcctccttcttcactgc

SEQ ID NO: 924 - DNA, 20 bp, Artificial Sequence
  Description of Artificial Sequence: Synthetic oligonucleotide
ctctgcctccttcttcactg

SEQ ID NO: 925 - DNA, 20 bp, Artificial Sequence
  Description of Artificial Sequence: Synthetic oligonucleotide
actctgcctccttcttcact

SEQ ID NO: 926 - DNA, 20 bp, Artificial Sequence
  Description of Artificial Sequence: Synthetic oligonucleotide
aactctgcctccttcttcac

SEQ ID NO: 927 - DNA, 20 bp, Artificial Sequence
  Description of Artificial Sequence: Synthetic oligonucleotide
caactctgcctccttcttca

SEQ ID NO: 928 - DNA, 20 bp, Artificial Sequence
  Description of Artificial Sequence: Synthetic oligonucleotide
ccaactctgcctccttcttc

SEQ ID NO: 929 - DNA, 20 bp, Artificial Sequence
  Description of Artificial Sequence: Synthetic oligonucleotide
tccaactctgcctccttctt

SEQ ID NO: 930 - DNA, 20 bp, Artificial Sequence
  Description of Artificial Sequence: Synthetic oligonucleotide
gtccaactctgcctccttct

SEQ ID NO: 931 - DNA, 20 bp, Artificial Sequence
  Description of Artificial Sequence: Synthetic oligonucleotide
tgtccaactctgcctccttc

SEQ ID NO: 932 - DNA, 20 bp, Artificial Sequence
  Description of Artificial Sequence: Synthetic oligonucleotide
ttgtccaactctgcctcctt

SEQ ID NO: 933 - DNA, 20 bp, Artificial Sequence
  Description of Artificial Sequence: Synthetic oligonucleotide
cttgtccaactctgcctcct

SEQ ID NO: 934 - DNA, 20 bp, Artificial Sequence
  Description of Artificial Sequence: Synthetic oligonucleotide
acttgtccaactctgcctcc

SEQ ID NO: 935 - DNA, 20 bp, Artificial Sequence
  Description of Artificial Sequence: Synthetic oligonucleotide
tacttgtccaactctgcctc

SEQ ID NO: 936 - DNA, 20 bp, Artificial Sequence
  Description of Artificial Sequence: Synthetic oligonucleotide
gtacttgtccaactctgcct

SEQ ID NO: 937 - DNA, 20 bp, Artificial Sequence
  Description of Artificial Sequence: Synthetic oligonucleotide
ggtacttgtccaactctgcc

SEQ ID NO: 938 - DNA, 20 bp, Artificial Sequence
  Description of Artificial Sequence: Synthetic oligonucleotide
aggtacttgtccaactctgc

SEQ ID NO: 939 - DNA, 20 bp, Artificial Sequence
  Description of Artificial Sequence: Synthetic oligonucleotide
caggtacttgtccaactctg

SEQ ID NO: 940 - DNA, 20 bp, Artificial Sequence
  Description of Artificial Sequence: Synthetic oligonucleotide
ccaggtacttgtccaactct

SEQ ID NO: 941 - DNA, 20 bp, Artificial Sequence
  Description of Artificial Sequence: Synthetic oligonucleotide
tccaggtacttgtccaactc

SEQ ID NO: 942 - DNA, 20 bp, Artificial Sequence
  Description of Artificial Sequence: Synthetic oligonucleotide
ttccaggtacttgtccaact

SEQ ID NO: 943 - DNA, 20 bp, Artificial Sequence
  Description of Artificial Sequence: Synthetic oligonucleotide
attccaggtacttgtccaac

SEQ ID NO: 944 - DNA, 20 bp, Artificial Sequence
  Description of Artificial Sequence: Synthetic oligonucleotide
cattccaggtacttgtccaa

SEQ ID NO: 945 - DNA, 20 bp, Artificial Sequence
  Description of Artificial Sequence: Synthetic oligonucleotide
gcattccaggtacttgtcca

SEQ ID NO: 946 - DNA, 20 bp, Artificial Sequence
  Description of Artificial Sequence: Synthetic oligonucleotide
tgcattccaggtacttgtcc

SEQ ID NO: 947 - DNA, 20 bp, Artificial Sequence
  Description of Artificial Sequence: Synthetic oligonucleotide
ctgcattccaggtacttgtc

SEQ ID NO: 948 - DNA, 20 bp, Artificial Sequence
  Description of Artificial Sequence: Synthetic oligonucleotide
tctgcattccaggtacttgt

SEQ ID NO: 949 - DNA, 20 bp, Artificial Sequence
  Description of Artificial Sequence: Synthetic oligonucleotide
ctctgcattccaggtacttg

SEQ ID NO: 950 - DNA, 20 bp, Artificial Sequence
  Description of Artificial Sequence: Synthetic oligonucleotide
actctgcattccaggtactt

SEQ ID NO: 951 - DNA, 20 bp, Artificial Sequence
  Description of Artificial Sequence: Synthetic oligonucleotide
tactctgcattccaggtact

SEQ ID NO: 952 - DNA, 20 bp, Artificial Sequence
  Description of Artificial Sequence: Synthetic oligonucleotide
ctactctgcattccaggtac

SEQ ID NO: 953 - DNA, 20 bp, Artificial Sequence
  Description of Artificial Sequence: Synthetic oligonucleotide
tctactctgcattccaggta

SEQ ID NO: 954 - DNA, 20 bp, Artificial Sequence
  Description of Artificial Sequence: Synthetic oligonucleotide
ttctactctgcattccaggt

SEQ ID NO: 955 - DNA, 20 bp, Artificial Sequence
  Description of Artificial Sequence: Synthetic oligonucleotide
cttctactctgcattccagg

SEQ ID NO: 956 - DNA, 20 bp, Artificial Sequence
  Description of Artificial Sequence: Synthetic oligonucleotide
gacctagaggatcaagacat

SEQ ID NO: 957 - DNA, 20 bp, Artificial Sequence
  Description of Artificial Sequence: Synthetic oligonucleotide
acctagaggatcaagacata

SEQ ID NO: 958 - DNA, 20 bp, Artificial Sequence
  Description of Artificial Sequence: Synthetic oligonucleotide
cctagaggatcaagacataa

SEQ ID NO: 959 - DNA, 20 bp, Artificial Sequence
  Description of Artificial Sequence: Synthetic oligonucleotide
ctagaggatcaagacataat

SEQ ID NO: 960 - DNA, 20 bp, Artificial Sequence
  Description of Artificial Sequence: Synthetic oligonucleotide
tagaggatcaagacataatg

SEQ ID NO: 961 - DNA, 20 bp, Artificial Sequence
  Description of Artificial Sequence: Synthetic oligonucleotide
agaggatcaagacataatgg

SEQ ID NO: 962 - DNA, 20 bp, Artificial Sequence
  Description of Artificial Sequence: Synthetic oligonucleotide
gaggatcaagacataatggg

SEQ ID NO: 963 - DNA, 20 bp, Artificial Sequence
  Description of Artificial Sequence: Synthetic oligonucleotide
aggatcaagacataatggga

SEQ ID NO: 964 - DNA, 20 bp, Artificial Sequence
  Description of Artificial Sequence: Synthetic oligonucleotide
ggatcaagacataatgggag

SEQ ID NO: 965 - DNA, 20 bp, Artificial Sequence
  Description of Artificial Sequence: Synthetic oligonucleotide
gatcaagacataatgggagc

SEQ ID NO: 966 - DNA, 20 bp, Artificial Sequence
  Description of Artificial Sequence: Synthetic oligonucleotide
atcaagacataatgggagca

SEQ ID NO: 967 - DNA, 20 bp, Artificial Sequence
  Description of Artificial Sequence: Synthetic oligonucleotide
tcaagacataatgggagcat

SEQ ID NO: 968 - DNA, 20 bp, Artificial Sequence
  Description of Artificial Sequence: Synthetic oligonucleotide
caagacataatgggagcatt

SEQ ID NO: 969 - DNA, 20 bp, Artificial Sequence
  Description of Artificial Sequence: Synthetic oligonucleotide
aagacataatgggagcattt

SEQ ID NO: 970 - DNA, 20 bp, Artificial Sequence
  Description of Artificial Sequence: Synthetic oligonucleotide
agacataatgggagcatttt

SEQ ID NO: 971 - DNA, 20 bp, Artificial Sequence
  Description of Artificial Sequence: Synthetic oligonucleotide
gacataatgggagcattttt

SEQ ID NO: 972 - DNA, 20 bp, Artificial Sequence
  Description of Artificial Sequence: Synthetic oligonucleotide
acataatgggagcattttta

SEQ ID NO: 973 - DNA, 20 bp, Artificial Sequence
  Description of Artificial Sequence: Synthetic oligonucleotide
cataatgggagcatttttag

SEQ ID NO: 974 - DNA, 20 bp, Artificial Sequence
  Description of Artificial Sequence: Synthetic oligonucleotide
ataatgggagcatttttaga

SEQ ID NO: 975 - DNA, 20 bp, Artificial Sequence
  Description of Artificial Sequence: Synthetic oligonucleotide
taatgggagcatttttagac

SEQ ID NO: 976 - DNA, 20 bp, Artificial Sequence
  Description of Artificial Sequence: Synthetic oligonucleotide
aatgggagcatttttagaca

SEQ ID NO: 977 - DNA, 20 bp, Artificial Sequence
  Description of Artificial Sequence: Synthetic oligonucleotide
atgggagcatttttagacaa

SEQ ID NO: 978 - DNA, 20 bp, Artificial Sequence
  Description of Artificial Sequence: Synthetic oligonucleotide
tgggagcatttttagacaag

SEQ ID NO: 979 - DNA, 20 bp, Artificial Sequence
  Description of Artificial Sequence: Synthetic oligonucleotide
gggagcatttttagacaagc

SEQ ID NO: 980 - DNA, 20 bp, Artificial Sequence
  Description of Artificial Sequence: Synthetic oligonucleotide
ggagcatttttagacaagcc

SEQ ID NO: 981 - DNA, 20 bp, Artificial Sequence
  Description of Artificial Sequence: Synthetic oligonucleotide
gagcatttttagacaagcca

SEQ ID NO: 982 - DNA, 20 bp, Artificial Sequence
  Description of Artificial Sequence: Synthetic oligonucleotide
agcatttttagacaagccaa

SEQ ID NO: 983 - DNA, 20 bp, Artificial Sequence
  Description of Artificial Sequence: Synthetic oligonucleotide
gcatttttagacaagccaaa

SEQ ID NO: 984 - DNA, 20 bp, Artificial Sequence
  Description of Artificial Sequence: Synthetic oligonucleotide
catttttagacaagccaaag

SEQ ID NO: 985 - DNA, 20 bp, Artificial Sequence
  Description of Artificial Sequence: Synthetic oligonucleotide
atttttagacaagccaaaga

SEQ ID NO: 986 - DNA, 20 bp, Artificial Sequence
  Description of Artificial Sequence: Synthetic oligonucleotide
tttttagacaagccaaagat

SEQ ID NO: 987 - DNA, 20 bp, Artificial Sequence
  Description of Artificial Sequence: Synthetic oligonucleotide
ttttagacaagccaaagatg

SEQ ID NO: 988 - DNA, 20 bp, Artificial Sequence
  Description of Artificial Sequence: Synthetic oligonucleotide
tttagacaagccaaagatgg

SEQ ID NO: 989 - DNA, 20 bp, Artificial Sequence
  Description of Artificial Sequence: Synthetic oligonucleotide
ttagacaagccaaagatgga

SEQ ID NO: 990 - DNA, 20 bp, Artificial Sequence
  Description of Artificial Sequence: Synthetic oligonucleotide
tagacaagccaaagatggaa

SEQ ID NO: 991 - DNA, 20 bp, Artificial Sequence
  Description of Artificial Sequence: Synthetic oligonucleotide
agacaagccaaagatggaaa

SEQ ID NO: 992 - DNA, 20 bp, Artificial Sequence
  Description of Artificial Sequence: Synthetic oligonucleotide
gacaagccaaagatggaaaa

SEQ ID NO: 993 - DNA, 20 bp, Artificial Sequence
  Description of Artificial Sequence: Synthetic oligonucleotide
acaagccaaagatggaaaag

SEQ ID NO: 994 - DNA, 20 bp, Artificial Sequence
  Description of Artificial Sequence: Synthetic oligonucleotide
caagccaaagatggaaaagc

SEQ ID NO: 995 - DNA, 20 bp, Artificial Sequence
  Description of Artificial Sequence: Synthetic oligonucleotide
aagccaaagatggaaaagca

SEQ ID NO: 996 - DNA, 20 bp, Artificial Sequence
  Description of Artificial Sequence: Synthetic oligonucleotide
agccaaagatggaaaagcat

SEQ ID NO: 997 - DNA, 20 bp, Artificial Sequence
  Description of Artificial Sequence: Synthetic oligonucleotide
gccaaagatggaaaagcata

SEQ ID NO: 998 - DNA, 20 bp, Artificial Sequence
  Description of Artificial Sequence: Synthetic oligonucleotide
ccaaagatggaaaagcataa

SEQ ID NO: 999 - DNA, 20 bp, Artificial Sequence
  Description of Artificial Sequence: Synthetic oligonucleotide
caaagatggaaaagcataat

SEQ ID NO: 1000 - DNA, 20 bp, Artificial Sequence
  Description of Artificial Sequence: Synthetic oligonucleotide
aaagatggaaaagcataatg

SEQ ID NO: 1001 - DNA, 20 bp, Artificial Sequence
  Description of Artificial Sequence: Synthetic oligonucleotide
aagatggaaaagcataatgc

SEQ ID NO: 1002 - DNA, 20 bp, Artificial Sequence
  Description of Artificial Sequence: Synthetic oligonucleotide
agatggaaaagcataatgcc

SEQ ID NO: 1003 - DNA, 20 bp, Artificial Sequence
  Description of Artificial Sequence: Synthetic oligonucleotide
gatggaaaagcataatgccc

SEQ ID NO: 1004 - DNA, 20 bp, Artificial Sequence
  Description of Artificial Sequence: Synthetic oligonucleotide
atggaaaagcataatgccca

SEQ ID NO: 1005 - DNA, 20 bp, Artificial Sequence
  Description of Artificial Sequence: Synthetic oligonucleotide
tggaaaagcataatgcccag

SEQ ID NO: 1006 - DNA, 20 bp, Artificial Sequence
  Description of Artificial Sequence: Synthetic oligonucleotide
ggaaaagcataatgcccagg

SEQ ID NO: 1007 - DNA, 20 bp, Artificial Sequence
  Description of Artificial Sequence: Synthetic oligonucleotide
gaaaagcataatgcccaggg

SEQ ID NO: 1008 - DNA, 20 bp, Artificial Sequence
  Description of Artificial Sequence: Synthetic oligonucleotide
aaaagcataatgcccagggg

SEQ ID NO: 1009 - DNA, 20 bp, Artificial Sequence
  Description of Artificial Sequence: Synthetic oligonucleotide
aaagcataatgcccaggggc

SEQ ID NO: 1010 - DNA, 20 bp, Artificial Sequence
  Description of Artificial Sequence: Synthetic oligonucleotide
aagcataatgcccaggggca

SEQ ID NO: 1011 - DNA, 20 bp, Artificial Sequence
  Description of Artificial Sequence: Synthetic oligonucleotide
agcataatgcccaggggcag

SEQ ID NO: 1012 - DNA, 20 bp, Artificial Sequence
  Description of Artificial Sequence: Synthetic oligonucleotide
gcataatgcccaggggcagg

SEQ ID NO: 1013 - DNA, 20 bp, Artificial Sequence
  Description of Artificial Sequence: Synthetic oligonucleotide
cataatgcccaggggcaggg

SEQ ID NO: 1014 - DNA, 20 bp, Artificial Sequence
  Description of Artificial Sequence: Synthetic oligonucleotide
ataatgcccaggggcagggt

SEQ ID NO: 1015 - DNA, 20 bp, Artificial Sequence
  Description of Artificial Sequence: Synthetic oligonucleotide
taatgcccaggggcagggta

SEQ ID NO: 1016 - DNA, 20 bp, Artificial Sequence
  Description of Artificial Sequence: Synthetic oligonucleotide
aatgcccaggggcagggtaa

SEQ ID NO: 1017 - DNA, 20 bp, Artificial Sequence
  Description of Artificial Sequence: Synthetic oligonucleotide
atgcccaggggcagggtaat

SEQ ID NO: 1018 - DNA, 20 bp, Artificial Sequence
  Description of Artificial Sequence: Synthetic oligonucleotide
tgcccaggggcagggtaatg

SEQ ID NO: 1019 - DNA, 20 bp, Artificial Sequence
  Description of Artificial Sequence: Synthetic oligonucleotide
gcccaggggcagggtaatgg

SEQ ID NO: 1020 - DNA, 20 bp, Artificial Sequence
  Description of Artificial Sequence: Synthetic oligonucleotide
cccaggggcagggtaatggg

SEQ ID NO: 1021 - DNA, 20 bp, Artificial Sequence
  Description of Artificial Sequence: Synthetic oligonucleotide
ccaggggcagggtaatgggt

SEQ ID NO: 1022 - DNA, 20 bp, Artificial Sequence
  Description of Artificial Sequence: Synthetic oligonucleotide
caggggcagggtaatgggtt

SEQ ID NO: 1023 - DNA, 20 bp, Artificial Sequence
  Description of Artificial Sequence: Synthetic oligonucleotide
aggggcagggtaatgggttg

SEQ ID NO: 1024 - DNA, 20 bp, Artificial Sequence
  Description of Artificial Sequence: Synthetic oligonucleotide
ggggcagggtaatgggttgc

SEQ ID NO: 1025 - DNA, 20 bp, Artificial Sequence
  Description of Artificial Sequence: Synthetic oligonucleotide
gggcagggtaatgggttgcg

SEQ ID NO: 1026 - DNA, 20 bp, Artificial Sequence
  Description of Artificial Sequence: Synthetic oligonucleotide
ggcagggtaatgggttgcga

SEQ ID NO: 1027 - DNA, 20 bp, Artificial Sequence
  Description of Artificial Sequence: Synthetic oligonucleotide
gcagggtaatgggttgcgat

SEQ ID NO: 1028 - DNA, 20 bp, Artificial Sequence
  Description of Artificial Sequence: Synthetic oligonucleotide
cagggtaatgggttgcgata

SEQ ID NO: 1029 - DNA, 20 bp, Artificial Sequence
  Description of Artificial Sequence: Synthetic oligonucleotide
agggtaatgggttgcgatat

SEQ ID NO: 1030 - DNA, 20 bp, Artificial Sequence
  Description of Artificial Sequence: Synthetic oligonucleotide
gggtaatgggttgcgatatg

SEQ ID NO: 1031 - DNA, 20 bp, Artificial Sequence
  Description of Artificial Sequence: Synthetic oligonucleotide
ggtaatgggttgcgatatgg

SEQ ID NO: 1032 - DNA, 20 bp, Artificial Sequence
  Description of Artificial Sequence: Synthetic oligonucleotide
gtaatgggttgcgatatggg

SEQ ID NO: 1033 - DNA, 20 bp, Artificial Sequence
  Description of Artificial Sequence: Synthetic oligonucleotide
taatgggttgcgatatgggc

SEQ ID NO: 1034 - DNA, 20 bp, Artificial Sequence
  Description of Artificial Sequence: Synthetic oligonucleotide
aatgggttgcgatatgggct

SEQ ID NO: 1035 - DNA, 20 bp, Artificial Sequence
  Description of Artificial Sequence: Synthetic oligonucleotide
atgggttgcgatatgggcta

SEQ ID NO: 1036 - DNA, 20 bp, Artificial Sequence
  Description of Artificial Sequence: Synthetic oligonucleotide
tgggttgcgatatgggctaa

SEQ ID NO: 1037 - DNA, 20 bp, Artificial Sequence
  Description of Artificial Sequence: Synthetic oligonucleotide
gggttgcgatatgggctaag

SEQ ID NO: 1038 - DNA, 20 bp, Artificial Sequence
  Description of Artificial Sequence: Synthetic oligonucleotide
ggttgcgatatgggctaagc

SEQ ID NO: 1039 - DNA, 20 bp, Artificial Sequence
  Description of Artificial Sequence: Synthetic oligonucleotide
gttgcgatatgggctaagca

SEQ ID NO: 1040 - DNA, 20 bp, Artificial Sequence
  Description of Artificial Sequence: Synthetic oligonucleotide
ttgcgatatgggctaagcag

SEQ ID NO: 1041 - DNA, 20 bp, Artificial Sequence
  Description of Artificial Sequence: Synthetic oligonucleotide
tgcgatatgggctaagcagc

SEQ ID NO: 1042 - DNA, 20 bp, Artificial Sequence
  Description of Artificial Sequence: Synthetic oligonucleotide
gcgatatgggctaagcagca

SEQ ID NO: 1043 - DNA, 20 bp, Artificial Sequence
  Description of Artificial Sequence: Synthetic oligonucleotide
cgatatgggctaagcagcat

SEQ ID NO: 1044 - DNA, 20 bp, Artificial Sequence
  Description of Artificial Sequence: Synthetic oligonucleotide
gatatgggctaagcagcatg

SEQ ID NO: 1045 - DNA, 20 bp, Artificial Sequence
  Description of Artificial Sequence: Synthetic oligonucleotide
atatgggctaagcagcatgc

SEQ ID NO: 1046 - DNA, 20 bp, Artificial Sequence
  Description of Artificial Sequence: Synthetic oligonucleotide
tatgggctaagcagcatgca

SEQ ID NO: 1047 - DNA, 20 bp, Artificial Sequence
  Description of Artificial Sequence: Synthetic oligonucleotide
atgggctaagcagcatgcaa

SEQ ID NO: 1048 - DNA, 20 bp, Artificial Sequence
  Description of Artificial Sequence: Synthetic oligonucleotide
tgggctaagcagcatgcaag

SEQ ID NO: 1049 - DNA, 20 bp, Artificial Sequence
  Description of Artificial Sequence: Synthetic oligonucleotide
gggctaagcagcatgcaagg

SEQ ID NO: 1050 - DNA, 20 bp, Artificial Sequence
  Description of Artificial Sequence: Synthetic oligonucleotide
ggctaagcagcatgcaaggc

SEQ ID NO: 1051 - DNA, 20 bp, Artificial Sequence
  Description of Artificial Sequence: Synthetic oligonucleotide
gctaagcagcatgcaaggct

SEQ ID NO: 1052 - DNA, 20 bp, Artificial Sequence
  Description of Artificial Sequence: Synthetic oligonucleotide
ctaagcagcatgcaaggctg

SEQ ID NO: 1053 - DNA, 20 bp, Artificial Sequence
  Description of Artificial Sequence: Synthetic oligonucleotide
taagcagcatgcaaggctgg

SEQ ID NO: 1054 - DNA, 20 bp, Artificial Sequence
  Description of Artificial Sequence: Synthetic oligonucleotide
aagcagcatgcaaggctggc

SEQ ID NO: 1055 - DNA, 20 bp, Artificial Sequence
  Description of Artificial Sequence: Synthetic oligonucleotide
agcagcatgcaaggctggcg

SEQ ID NO: 1056 - DNA, 20 bp, Artificial Sequence
  Description of Artificial Sequence: Synthetic oligonucleotide
gcagcatgcaaggctggcgt

SEQ ID NO: 1057 - DNA, 20 bp, Artificial Sequence
  Description of Artificial Sequence: Synthetic oligonucleotide
cagcatgcaaggctggcgtg

SEQ ID NO: 1058 - DNA, 20 bp, Artificial Sequence
  Description of Artificial Sequence: Synthetic oligonucleotide
agcatgcaaggctggcgtgt

SEQ ID NO: 1059 - DNA, 20 bp, Artificial Sequence
  Description of Artificial Sequence: Synthetic oligonucleotide
gcatgcaaggctggcgtgtt

SEQ ID NO: 1060 - DNA, 20 bp, Artificial Sequence
  Description of Artificial Sequence: Synthetic oligonucleotide
catgcaaggctggcgtgttg

SEQ ID NO: 1061 - DNA, 20 bp, Artificial Sequence
  Description of Artificial Sequence: Synthetic oligonucleotide
atgcaaggctggcgtgttga

SEQ ID NO: 1062 - DNA, 20 bp, Artificial Sequence
  Description of Artificial Sequence: Synthetic oligonucleotide
tgcaaggctggcgtgttgaa

SEQ ID NO: 1063 - DNA, 20 bp, Artificial Sequence
  Description of Artificial Sequence: Synthetic oligonucleotide
gcaaggctggcgtgttgaaa

SEQ ID NO: 1064 - DNA, 20 bp, Artificial Sequence
  Description of Artificial Sequence: Synthetic oligonucleotide
caaggctggcgtgttgaaat

SEQ ID NO: 1065 - DNA, 20 bp, Artificial Sequence
  Description of Artificial Sequence: Synthetic oligonucleotide
aaggctggcgtgttgaaatg

SEQ ID NO: 1066 - DNA, 20 bp, Artificial Sequence
  Description of Artificial Sequence: Synthetic oligonucleotide
aggctggcgtgttgaaatgg

SEQ ID NO: 1067 - DNA, 20 bp, Artificial Sequence
  Description of Artificial Sequence: Synthetic oligonucleotide
ggctggcgtgttgaaatgga

SEQ ID NO: 1068 - DNA, 20 bp, Artificial Sequence
  Description of Artificial Sequence: Synthetic oligonucleotide
gctggcgtgttgaaatggag

SEQ ID NO: 1069 - DNA, 20 bp, Artificial Sequence
  Description of Artificial Sequence: Synthetic oligonucleotide
ctggcgtgttgaaatggagg

SEQ ID NO: 1070 - DNA, 20 bp, Artificial Sequence
  Description of Artificial Sequence: Synthetic oligonucleotide
tggcgtgttgaaatggagga

SEQ ID NO: 1071 - DNA, 20 bp, Artificial Sequence
  Description of Artificial Sequence: Synthetic oligonucleotide
ggcgtgttgaaatggaggat

SEQ ID NO: 1072 - DNA, 20 bp, Artificial Sequence
  Description of Artificial Sequence: Synthetic oligonucleotide
gcgtgttgaaatggaggatg

SEQ ID NO: 1073 - DNA, 20 bp, Artificial Sequence
  Description of Artificial Sequence: Synthetic oligonucleotide
cgtgttgaaatggaggatgc

SEQ ID NO: 1074 - DNA, 20 bp, Artificial Sequence
  Description of Artificial Sequence: Synthetic oligonucleotide
gtgttgaaatggaggatgca

SEQ ID NO: 1075 - DNA, 20 bp, Artificial Sequence
  Description of Artificial Sequence: Synthetic oligonucleotide
tgttgaaatggaggatgcac

SEQ ID NO: 1076 - DNA, 20 bp, Artificial Sequence
  Description of Artificial Sequence: Synthetic oligonucleotide
gttgaaatggaggatgcaca

SEQ ID NO: 1077 - DNA, 20 bp, Artificial Sequence
  Description of Artificial Sequence: Synthetic oligonucleotide
ttgaaatggaggatgcacat

SEQ ID NO: 1078 - DNA, 20 bp, Artificial Sequence
  Description of Artificial Sequence: Synthetic oligonucleotide
tgaaatggaggatgcacata

SEQ ID NO: 1079 - DNA, 20 bp, Artificial Sequence
  Description of Artificial Sequence: Synthetic oligonucleotide
gaaatggaggatgcacatac

SEQ ID NO: 1080 - DNA, 20 bp, Artificial Sequence
  Description of Artificial Sequence: Synthetic oligonucleotide
aaatggaggatgcacatacg

SEQ ID NO: 1081 - DNA, 20 bp, Artificial Sequence
  Description of Artificial Sequence: Synthetic oligonucleotide
aatggaggatgcacatacgg

SEQ ID NO: 1082 - DNA, 20 bp, Artificial Sequence
  Description of Artificial Sequence: Synthetic oligonucleotide
atggaggatgcacatacggc

SEQ ID NO: 1083 - DNA, 20 bp, Artificial Sequence
  Description of Artificial Sequence: Synthetic oligonucleotide
tggaggatgcacatacggct

SEQ ID NO: 1084 - DNA, 20 bp, Artificial Sequence
  Description of Artificial Sequence: Synthetic oligonucleotide
ggaggatgcacatacggctg

SEQ ID NO: 1085 - DNA, 20 bp, Artificial Sequence
  Description of Artificial Sequence: Synthetic oligonucleotide
gaggatgcacatacggctgt

SEQ ID NO: 1086 - DNA, 20 bp, Artificial Sequence
  Description of Artificial Sequence: Synthetic oligonucleotide
aggatgcacatacggctgtg

SEQ ID NO: 1087 - DNA, 20 bp, Artificial Sequence
  Description of Artificial Sequence: Synthetic oligonucleotide
ggatgcacatacggctgtga

SEQ ID NO: 1088 - DNA, 20 bp, Artificial Sequence
  Description of Artificial Sequence: Synthetic oligonucleotide
gatgcacatacggctgtgat

SEQ ID NO: 1089 - DNA, 20 bp, Artificial Sequence
  Description of Artificial Sequence: Synthetic oligonucleotide
atgcacatacggctgtgatc

SEQ ID NO: 1090 - DNA, 20 bp, Artificial Sequence
  Description of Artificial Sequence: Synthetic oligonucleotide
tgcacatacggctgtgatcg

SEQ ID NO: 1091 - DNA, 20 bp, Artificial Sequence
  Description of Artificial Sequence: Synthetic oligonucleotide
gcacatacggctgtgatcgg

SEQ ID NO: 1092 - DNA, 20 bp, Artificial Sequence
  Description of Artificial Sequence: Synthetic oligonucleotide
cacatacggctgtgatcggt

SEQ ID NO: 1093 - DNA, 20 bp, Artificial Sequence
  Description of Artificial Sequence: Synthetic oligonucleotide
acatacggctgtgatcggtt

SEQ ID NO: 1094 - DNA, 20 bp, Artificial Sequence
  Description of Artificial Sequence: Synthetic oligonucleotide
catacggctgtgatcggttt

SEQ ID NO: 1095 - DNA, 20 bp, Artificial Sequence
  Description of Artificial Sequence: Synthetic oligonucleotide
atacggctgtgatcggtttg

SEQ ID NO: 1096 - DNA, 20 bp, Artificial Sequence
  Description of Artificial Sequence: Synthetic oligonucleotide
tacggctgtgatcggtttgc

SEQ ID NO: 1097 - DNA, 20 bp, Artificial Sequence
  Description of Artificial Sequence: Synthetic oligonucleotide
acggctgtgatcggtttgcc

SEQ ID NO: 1098 - DNA, 20 bp, Artificial Sequence
  Description of Artificial Sequence: Synthetic oligonucleotide
cggctgtgatcggtttgcca

SEQ ID NO: 1099 - DNA, 20 bp, Artificial Sequence
  Description of Artificial Sequence: Synthetic oligonucleotide
ggctgtgatcggtttgccaa

SEQ ID NO: 1100 - DNA, 20 bp, Artificial Sequence
  Description of Artificial Sequence: Synthetic oligonucleotide
gctgtgatcggtttgccaag

SEQ ID NO: 1101 - DNA, 20 bp, Artificial Sequence
  Description of Artificial Sequence: Synthetic oligonucleotide
ctgtgatcggtttgccaagt

SEQ ID NO: 1102 - DNA, 20 bp, Artificial Sequence
  Description of Artificial Sequence: Synthetic oligonucleotide
tgtgatcggtttgccaagtg

SEQ ID NO: 1103 - DNA, 20 bp, Artificial Sequence
  Description of Artificial Sequence: Synthetic oligonucleotide
gtgatcggtttgccaagtgg

SEQ ID NO: 1104 - DNA, 20 bp, Artificial Sequence
  Description of Artificial Sequence: Synthetic oligonucleotide
tgatcggtttgccaagtgga

SEQ ID NO: 1105 - DNA, 20 bp, Artificial Sequence
  Description of Artificial Sequence: Synthetic oligonucleotide
gatcggtttgccaagtggac

SEQ ID NO: 1106 - DNA, 20 bp, Artificial Sequence
  Description of Artificial Sequence: Synthetic oligonucleotide
atcggtttgccaagtggact

SEQ ID NO: 1107 - DNA, 20 bp, Artificial Sequence
  Description of Artificial Sequence: Synthetic oligonucleotide
tcggtttgccaagtggactt

SEQ ID NO: 1108 - DNA, 20 bp, Artificial Sequence
  Description of Artificial Sequence: Synthetic oligonucleotide
cggtttgccaagtggacttg

SEQ ID NO: 1109 - DNA, 20 bp, Artificial Sequence
  Description of Artificial Sequence: Synthetic oligonucleotide
ggtttgccaagtggacttga

SEQ ID NO: 1110 - DNA, 20 bp, Artificial Sequence
  Description of Artificial Sequence: Synthetic oligonucleotide
gtttgccaagtggacttgaa

SEQ ID NO: 1111 - DNA, 20 bp, Artificial Sequence
  Description of Artificial Sequence: Synthetic oligonucleotide
tttgccaagtggacttgaat

SEQ ID NO: 1112 - DNA, 20 bp, Artificial Sequence
  Description of Artificial Sequence: Synthetic oligonucleotide
ttgccaagtggacttgaatc

SEQ ID NO: 1113 - DNA, 20 bp, Artificial Sequence
  Description of Artificial Sequence: Synthetic oligonucleotide
tgccaagtggacttgaatcg

SEQ ID NO: 1114 - DNA, 20 bp, Artificial Sequence
  Description of Artificial Sequence: Synthetic oligonucleotide
gccaagtggacttgaatcgt

SEQ ID NO: 1115 - DNA, 20 bp, Artificial Sequence
  Description of Artificial Sequence: Synthetic oligonucleotide
ccaagtggacttgaatcgtg

SEQ ID NO: 1116 - DNA, 20 bp, Artificial Sequence
  Description of Artificial Sequence: Synthetic oligonucleotide
caagtggacttgaatcgtgg

SEQ ID NO: 1117 - DNA, 20 bp, Artificial Sequence
  Description of Artificial Sequence: Synthetic oligonucleotide
aagtggacttgaatcgtggt

SEQ ID NO: 1118 - DNA, 20 bp, Artificial Sequence
  Description of Artificial Sequence: Synthetic oligonucleotide
agtggacttgaatcgtggtc

SEQ ID NO: 1119 - DNA, 20 bp, Artificial Sequence
  Description of Artificial Sequence: Synthetic oligonucleotide
gtggacttgaatcgtggtca

SEQ ID NO: 1120 - DNA, 20 bp, Artificial Sequence
  Description of Artificial Sequence: Synthetic oligonucleotide
tggacttgaatcgtggtcat

SEQ ID NO: 1121 - DNA, 20 bp, Artificial Sequence
  Description of Artificial Sequence: Synthetic oligonucleotide
ggacttgaatcgtggtcatt

SEQ ID NO: 1122 - DNA, 20 bp, Artificial Sequence
  Description of Artificial Sequence: Synthetic oligonucleotide
gacttgaatcgtggtcattc

SEQ ID NO: 1123 - DNA, 20 bp, Artificial Sequence
  Description of Artificial Sequence: Synthetic oligonucleotide
acttgaatcgtggtcattct

SEQ ID NO: 1124 - DNA, 20 bp, Artificial Sequence
  Description of Artificial Sequence: Synthetic oligonucleotide
cttgaatcgtggtcattctt

SEQ ID NO: 1125 - DNA, 20 bp, Artificial Sequence
  Description of Artificial Sequence: Synthetic oligonucleotide
ttgaatcgtggtcattcttt

SEQ ID NO: 1126 - DNA, 20 bp, Artificial Sequence
  Description of Artificial Sequence: Synthetic oligonucleotide
tgaatcgtggtcattctttg

SEQ ID NO: 1127 - DNA, 20 bp, Artificial Sequence
  Description of Artificial Sequence: Synthetic oligonucleotide
gaatcgtggtcattctttgc

SEQ ID NO: 1128 - DNA, 20 bp, Artificial Sequence
  Description of Artificial Sequence: Synthetic oligonucleotide
aatcgtggtcattctttgct

SEQ ID NO: 1129 - DNA, 20 bp, Artificial Sequence
  Description of Artificial Sequence: Synthetic oligonucleotide
atcgtggtcattctttgctg

SEQ ID NO: 1130 - DNA, 20 bp, Artificial Sequence
  Description of Artificial Sequence: Synthetic oligonucleotide
tcgtggtcattctttgctgt

SEQ ID NO: 1131 - DNA, 20 bp, Artificial Sequence
  Description of Artificial Sequence: Synthetic oligonucleotide
cgtggtcattctttgctgtg

SEQ ID NO: 1132 - DNA, 20 bp, Artificial Sequence
  Description of Artificial Sequence: Synthetic oligonucleotide
gtggtcattctttgctgtgt

SEQ ID NO: 1133 - DNA, 20 bp, Artificial Sequence
  Description of Artificial Sequence: Synthetic oligonucleotide
tggtcattctttgctgtgta

SEQ ID NO: 1134 - DNA, 20 bp, Artificial Sequence
  Description of Artificial Sequence: Synthetic oligonucleotide
ggtcattctttgctgtgtat

SEQ ID NO: 1135 - DNA, 20 bp, Artificial Sequence
  Description of Artificial Sequence: Synthetic oligonucleotide
gtcattctttgctgtgtatg

SEQ ID NO: 1136 - DNA, 20 bp, Artificial Sequence
  Description of Artificial Sequence: Synthetic oligonucleotide
tcattctttgctgtgtatga

SEQ ID NO: 1137 - DNA, 20 bp, Artificial Sequence
  Description of Artificial Sequence: Synthetic oligonucleotide
cattctttgctgtgtatgat

SEQ ID NO: 1138 - DNA, 20 bp, Artificial Sequence
  Description of Artificial Sequence: Synthetic oligonucleotide
attctttgctgtgtatgatg

SEQ ID NO: 1139 - DNA, 20 bp, Artificial Sequence
  Description of Artificial Sequence: Synthetic oligonucleotide
ttctttgctgtgtatgatgg

SEQ ID NO: 1140 - DNA, 20 bp, Artificial Sequence
  Description of Artificial Sequence: Synthetic oligonucleotide
tctttgctgtgtatgatggg

SEQ ID NO: 1141 - DNA, 20 bp, Artificial Sequence
  Description of Artificial Sequence: Synthetic oligonucleotide
ctttgctgtgtatgatgggc

SEQ ID NO: 1142 - DNA, 20 bp, Artificial Sequence
  Description of Artificial Sequence: Synthetic oligonucleotide
tttgctgtgtatgatgggca

SEQ ID NO: 1143 - DNA, 20 bp, Artificial Sequence
  Description of Artificial Sequence: Synthetic oligonucleotide
ttgctgtgtatgatgggcat

SEQ ID NO: 1144 - DNA, 20 bp, Artificial Sequence
  Description of Artificial Sequence: Synthetic oligonucleotide
tgctgtgtatgatgggcatg

SEQ ID NO: 1145 - DNA, 20 bp, Artificial Sequence
  Description of Artificial Sequence: Synthetic oligonucleotide
gctgtgtatgatgggcatgc

SEQ ID NO: 1146 - DNA, 20 bp, Artificial Sequence
  Description of Artificial Sequence: Synthetic oligonucleotide
ctgtgtatgatgggcatgct

SEQ ID NO: 1147 - DNA, 20 bp, Artificial Sequence
  Description of Artificial Sequence: Synthetic oligonucleotide
tgtgtatgatgggcatgctg

SEQ ID NO: 1148 - DNA, 20 bp, Artificial Sequence
  Description of Artificial Sequence: Synthetic oligonucleotide
gtgtatgatgggcatgctgg

SEQ ID NO: 1149 - DNA, 20 bp, Artificial Sequence
  Description of Artificial Sequence: Synthetic oligonucleotide
tgtatgatgggcatgctggt

SEQ ID NO: 1150 - DNA, 20 bp, Artificial Sequence
  Description of Artificial Sequence: Synthetic oligonucleotide
gtatgatgggcatgctggtt

SEQ ID NO: 1151 - DNA, 20 bp, Artificial Sequence
  Description of Artificial Sequence: Synthetic oligonucleotide
tatgatgggcatgctggttc

SEQ ID NO: 1152 - DNA, 20 bp, Artificial Sequence
  Description of Artificial Sequence: Synthetic oligonucleotide
atgatgggcatgctggttct

SEQ ID NO: 1153 - DNA, 20 bp, Artificial Sequence
  Description of Artificial Sequence: Synthetic oligonucleotide
tgatgggcatgctggttctc

SEQ ID NO: 1154 - DNA, 20 bp, Artificial Sequence
  Description of Artificial Sequence: Synthetic oligonucleotide
gatgggcatgctggttctca

SEQ ID NO: 1155 - DNA, 20 bp, Artificial Sequence
  Description of Artificial Sequence: Synthetic oligonucleotide
atgggcatgctggttctcag

SEQ ID NO: 1156 - DNA, 20 bp, Artificial Sequence
  Description of Artificial Sequence: Synthetic oligonucleotide
tgggcatgctggttctcagg

SEQ ID NO: 1157 - DNA, 20 bp, Artificial Sequence
  Description of Artificial Sequence: Synthetic oligonucleotide
gggcatgctggttctcaggt

SEQ ID NO: 1158 - DNA, 20 bp, Artificial Sequence
  Description of Artificial Sequence: Synthetic oligonucleotide
ggcatgctggttctcaggtt

SEQ ID NO: 1159 - DNA, 20 bp, Artificial Sequence
  Description of Artificial Sequence: Synthetic oligonucleotide
gcatgctggttctcaggttg

SEQ ID NO: 1160 - DNA, 20 bp, Artificial Sequence
  Description of Artificial Sequence: Synthetic oligonucleotide
catgctggttctcaggttgc

SEQ ID NO: 1161 - DNA, 20 bp, Artificial Sequence
  Description of Artificial Sequence: Synthetic oligonucleotide
atgctggttctcaggttgcc

SEQ ID NO: 1162 - DNA, 20 bp, Artificial Sequence
  Description of Artificial Sequence: Synthetic oligonucleotide
tgctggttctcaggttgcca

SEQ ID NO: 1163 - DNA, 20 bp, Artificial Sequence
  Description of Artificial Sequence: Synthetic oligonucleotide
gctggttctcaggttgccaa

SEQ ID NO: 1164 - DNA, 20 bp, Artificial Sequence
  Description of Artificial Sequence: Synthetic oligonucleotide
ctggttctcaggttgccaaa

SEQ ID NO: 1165 - DNA, 20 bp, Artificial Sequence
  Description of Artificial Sequence: Synthetic oligonucleotide
tggttctcaggttgccaaat

SEQ ID NO: 1166 - DNA, 20 bp, Artificial Sequence
  Description of Artificial Sequence: Synthetic oligonucleotide
ggttctcaggttgccaaata

SEQ ID NO: 1167 - DNA, 20 bp, Artificial Sequence
  Description of Artificial Sequence: Synthetic oligonucleotide
gttctcaggttgccaaatac

SEQ ID NO: 1168 - DNA, 20 bp, Artificial Sequence
  Description of Artificial Sequence: Synthetic oligonucleotide
ttctcaggttgccaaatact

SEQ ID NO: 1169 - DNA, 20 bp, Artificial Sequence
  Description of Artificial Sequence: Synthetic oligonucleotide
tctcaggttgccaaatactg

SEQ ID NO: 1170 - DNA, 20 bp, Artificial Sequence
  Description of Artificial Sequence: Synthetic oligonucleotide
ctcaggttgccaaatactgc

SEQ ID NO: 1171 - DNA, 20 bp, Artificial Sequence
  Description of Artificial Sequence: Synthetic oligonucleotide
tcaggttgccaaatactgct

SEQ ID NO: 1172 - DNA, 20 bp, Artificial Sequence
  Description of Artificial Sequence: Synthetic oligonucleotide
caggttgccaaatactgctg

SEQ ID NO: 1173 - DNA, 20 bp, Artificial Sequence
  Description of Artificial Sequence: Synthetic oligonucleotide
aggttgccaaatactgctgt

SEQ ID NO: 1174 - DNA, 20 bp, Artificial Sequence
  Description of Artificial Sequence: Synthetic oligonucleotide
ggttgccaaatactgctgtg

SEQ ID NO: 1175 - DNA, 20 bp, Artificial Sequence
  Description of Artificial Sequence: Synthetic oligonucleotide
gttgccaaatactgctgtga

SEQ ID NO: 1176 - DNA, 20 bp, Artificial Sequence
  Description of Artificial Sequence: Synthetic oligonucleotide
ttgccaaatactgctgtgag

SEQ ID NO: 1177 - DNA, 20 bp, Artificial Sequence
  Description of Artificial Sequence: Synthetic oligonucleotide
tgccaaatactgctgtgagc

SEQ ID NO: 1178 - DNA, 20 bp, Artificial Sequence
  Description of Artificial Sequence: Synthetic oligonucleotide
gccaaatactgctgtgagca

SEQ ID NO: 1179 - DNA, 20 bp, Artificial Sequence
  Description of Artificial Sequence: Synthetic oligonucleotide
ccaaatactgctgtgagcat

SEQ ID NO: 1180 - DNA, 20 bp, Artificial Sequence
  Description of Artificial Sequence: Synthetic oligonucleotide
caaatactgctgtgagcatt

SEQ ID NO: 1181 - DNA, 20 bp, Artificial Sequence
  Description of Artificial Sequence: Synthetic oligonucleotide
aaatactgctgtgagcattt

SEQ ID NO: 1182 - DNA, 20 bp, Artificial Sequence
  Description of Artificial Sequence: Synthetic oligonucleotide
aatactgctgtgagcatttg

SEQ ID NO: 1183 - DNA, 20 bp, Artificial Sequence
  Description of Artificial Sequence: Synthetic oligonucleotide
atactgctgtgagcatttgt

SEQ ID NO: 1184 - DNA, 20 bp, Artificial Sequence
  Description of Artificial Sequence: Synthetic oligonucleotide
tactgctgtgagcatttgtt

SEQ ID NO: 1185 - DNA, 20 bp, Artificial Sequence
  Description of Artificial Sequence: Synthetic oligonucleotide
actgctgtgagcatttgtta

SEQ ID NO: 1186 - DNA, 20 bp, Artificial Sequence
  Description of Artificial Sequence: Synthetic oligonucleotide
ctgctgtgagcatttgttag

SEQ ID NO: 1187 - DNA, 20 bp, Artificial Sequence
  Description of Artificial Sequence: Synthetic oligonucleotide
tgctgtgagcatttgttaga

SEQ ID NO: 1188 - DNA, 20 bp, Artificial Sequence
  Description of Artificial Sequence: Synthetic oligonucleotide
gctgtgagcatttgttagat

SEQ ID NO: 1189 - DNA, 20 bp, Artificial Sequence
  Description of Artificial Sequence: Synthetic oligonucleotide
ctgtgagcatttgttagatc

SEQ ID NO: 1190 - DNA, 20 bp, Artificial Sequence
  Description of Artificial Sequence: Synthetic oligonucleotide
tgtgagcatttgttagatca

SEQ ID NO: 1191 - DNA, 20 bp, Artificial Sequence
  Description of Artificial Sequence: Synthetic oligonucleotide
gtgagcatttgttagatcac

SEQ ID NO: 1192 - DNA, 20 bp, Artificial Sequence
  Description of Artificial Sequence: Synthetic oligonucleotide
tgagcatttgttagatcaca

SEQ ID NO: 1193 - DNA, 20 bp, Artificial Sequence
  Description of Artificial Sequence: Synthetic oligonucleotide
gagcatttgttagatcacat

SEQ ID NO: 1194 - DNA, 20 bp, Artificial Sequence
  Description of Artificial Sequence: Synthetic oligonucleotide
agcatttgttagatcacatc

SEQ ID NO: 1195 - DNA, 20 bp, Artificial Sequence
  Description of Artificial Sequence: Synthetic oligonucleotide
gcatttgttagatcacatca

SEQ ID NO: 1196 - DNA, 20 bp, Artificial Sequence
  Description of Artificial Sequence: Synthetic oligonucleotide
catttgttagatcacatcac

SEQ ID NO: 1197 - DNA, 20 bp, Artificial Sequence
  Description of Artificial Sequence: Synthetic oligonucleotide
atttgttagatcacatcacc

SEQ ID NO: 1198 - DNA, 20 bp, Artificial Sequence
  Description of Artificial Sequence: Synthetic oligonucleotide
tttgttagatcacatcacca

SEQ ID NO: 1199 - DNA, 20 bp, Artificial Sequence
  Description of Artificial Sequence: Synthetic oligonucleotide
ttgttagatcacatcaccaa

SEQ ID NO: 1200 - DNA, 20 bp, Artificial Sequence
  Description of Artificial Sequence: Synthetic oligonucleotide
tgttagatcacatcaccaat

SEQ ID NO: 1201 - DNA, 20 bp, Artificial Sequence
  Description of Artificial Sequence: Synthetic oligonucleotide
gttagatcacatcaccaata

SEQ ID NO: 1202 - DNA, 20 bp, Artificial Sequence
  Description of Artificial Sequence: Synthetic oligonucleotide
ttagatcacatcaccaataa

SEQ ID NO: 1203 - DNA, 20 bp, Artificial Sequence
  Description of Artificial Sequence: Synthetic oligonucleotide
tagatcacatcaccaataac

SEQ ID NO: 1204 - DNA, 20 bp, Artificial Sequence
  Description of Artificial Sequence: Synthetic oligonucleotide
agatcacatcaccaataacc

SEQ ID NO: 1205 - DNA, 20 bp, Artificial Sequence
  Description of Artificial Sequence: Synthetic oligonucleotide
gatcacatcaccaataacca

SEQ ID NO: 1206 - DNA, 20 bp, Artificial Sequence
  Description of Artificial Sequence: Synthetic oligonucleotide
atcacatcaccaataaccag

SEQ ID NO: 1207 - DNA, 20 bp, Artificial Sequence
  Description of Artificial Sequence: Synthetic oligonucleotide
tcacatcaccaataaccagg

SEQ ID NO: 1208 - DNA, 20 bp, Artificial Sequence
  Description of Artificial Sequence: Synthetic oligonucleotide
cacatcaccaataaccagga

SEQ ID NO: 1209 - DNA, 20 bp, Artificial Sequence
  Description of Artificial Sequence: Synthetic oligonucleotide
acatcaccaataaccaggat

SEQ ID NO: 1210 - DNA, 20 bp, Artificial Sequence
  Description of Artificial Sequence: Synthetic oligonucleotide
catcaccaataaccaggatt

SEQ ID NO: 1211 - DNA, 20 bp, Artificial Sequence
  Description of Artificial Sequence: Synthetic oligonucleotide
atcaccaataaccaggattt

SEQ ID NO: 1212 - DNA, 20 bp, Artificial Sequence
  Description of Artificial Sequence: Synthetic oligonucleotide
tcaccaataaccaggatttt

SEQ ID NO: 1213 - DNA, 20 bp, Artificial Sequence
  Description of Artificial Sequence: Synthetic oligonucleotide
caccaataaccaggatttta

SEQ ID NO: 1214 - DNA, 20 bp, Artificial Sequence
  Description of Artificial Sequence: Synthetic oligonucleotide
accaataaccaggattttaa

SEQ ID NO: 1215 - DNA, 20 bp, Artificial Sequence
  Description of Artificial Sequence: Synthetic oligonucleotide
ccaataaccaggattttaaa

SEQ ID NO: 1216 - DNA, 20 bp, Artificial Sequence
  Description of Artificial Sequence: Synthetic oligonucleotide
caataaccaggattttaaag

SEQ ID NO: 1217 - DNA, 20 bp, Artificial Sequence
  Description of Artificial Sequence: Synthetic oligonucleotide
aataaccaggattttaaagg

SEQ ID NO: 1218 - DNA, 20 bp, Artificial Sequence
  Description of Artificial Sequence: Synthetic oligonucleotide
ataaccaggattttaaaggg

SEQ ID NO: 1219 - DNA, 20 bp, Artificial Sequence
  Description of Artificial Sequence: Synthetic oligonucleotide
taaccaggattttaaagggt

SEQ ID NO: 1220 - DNA, 20 bp, Artificial Sequence
  Description of Artificial Sequence: Synthetic oligonucleotide
aaccaggattttaaagggtc

SEQ ID NO: 1221 - DNA, 20 bp, Artificial Sequence
  Description of Artificial Sequence: Synthetic oligonucleotide
accaggattttaaagggtct

SEQ ID NO: 1222 - DNA, 20 bp, Artificial Sequence
  Description of Artificial Sequence: Synthetic oligonucleotide
ccaggattttaaagggtctg

SEQ ID NO: 1223 - DNA, 20 bp, Artificial Sequence
  Description of Artificial Sequence: Synthetic oligonucleotide
caggattttaaagggtctgc

SEQ ID NO: 1224 - DNA, 20 bp, Artificial Sequence
  Description of Artificial Sequence: Synthetic oligonucleotide
aggattttaaagggtctgca

SEQ ID NO: 1225 - DNA, 20 bp, Artificial Sequence
  Description of Artificial Sequence: Synthetic oligonucleotide
ggattttaaagggtctgcag

SEQ ID NO: 1226 - DNA, 20 bp, Artificial Sequence
  Description of Artificial Sequence: Synthetic oligonucleotide
gattttaaagggtctgcagg

SEQ ID NO: 1227 - DNA, 20 bp, Artificial Sequence
  Description of Artificial Sequence: Synthetic oligonucleotide
attttaaagggtctgcagga

SEQ ID NO: 1228 - DNA, 20 bp, Artificial Sequence
  Description of Artificial Sequence: Synthetic oligonucleotide
ttttaaagggtctgcaggag

SEQ ID NO: 1229 - DNA, 20 bp, Artificial Sequence
  Description of Artificial Sequence: Synthetic oligonucleotide
tttaaagggtctgcaggagc

SEQ ID NO: 1230 - DNA, 20 bp, Artificial Sequence
  Description of Artificial Sequence: Synthetic oligonucleotide
ttaaagggtctgcaggagca

SEQ ID NO: 1231 - DNA, 20 bp, Artificial Sequence
  Description of Artificial Sequence: Synthetic oligonucleotide
taaagggtctgcaggagcac

SEQ ID NO: 1232 - DNA, 20 bp, Artificial Sequence
  Description of Artificial Sequence: Synthetic oligonucleotide
aaagggtctgcaggagcacc

SEQ ID NO: 1233 - DNA, 20 bp, Artificial Sequence
  Description of Artificial Sequence: Synthetic oligonucleotide
aagggtctgcaggagcacct

SEQ ID NO: 1234 - DNA, 20 bp, Artificial Sequence
  Description of Artificial Sequence: Synthetic oligonucleotide
agggtctgcaggagcacctt

SEQ ID NO: 1235 - DNA, 20 bp, Artificial Sequence
  Description of Artificial Sequence: Synthetic oligonucleotide
gggtctgcaggagcaccttc

SEQ ID NO: 1236 - DNA, 20 bp, Artificial Sequence
  Description of Artificial Sequence: Synthetic oligonucleotide
ggtctgcaggagcaccttct

SEQ ID NO: 1237 - DNA, 20 bp, Artificial Sequence
  Description of Artificial Sequence: Synthetic oligonucleotide
gtctgcaggagcaccttctg

SEQ ID NO: 1238 - DNA, 20 bp, Artificial Sequence
  Description of Artificial Sequence: Synthetic oligonucleotide
tctgcaggagcaccttctgt

SEQ ID NO: 1239 - DNA, 20 bp, Artificial Sequence
  Description of Artificial Sequence: Synthetic oligonucleotide
ctgcaggagcaccttctgtg

SEQ ID NO: 1240 - DNA, 20 bp, Artificial Sequence
  Description of Artificial Sequence: Synthetic oligonucleotide
tgcaggagcaccttctgtgg

SEQ ID NO: 1241 - DNA, 20 bp, Artificial Sequence
  Description of Artificial Sequence: Synthetic oligonucleotide
gcaggagcaccttctgtgga

SEQ ID NO: 1242 - DNA, 20 bp, Artificial Sequence
  Description of Artificial Sequence: Synthetic oligonucleotide
caggagcaccttctgtggaa

SEQ ID NO: 1243 - DNA, 20 bp, Artificial Sequence
  Description of Artificial Sequence: Synthetic oligonucleotide
aggagcaccttctgtggaaa

SEQ ID NO: 1244 - DNA, 20 bp, Artificial Sequence
  Description of Artificial Sequence: Synthetic oligonucleotide
ggagcaccttctgtggaaaa

SEQ ID NO: 1245 - DNA, 20 bp, Artificial Sequence
  Description of Artificial Sequence: Synthetic oligonucleotide
gagcaccttctgtggaaaat

SEQ ID NO: 1246 - DNA, 20 bp, Artificial Sequence
  Description of Artificial Sequence: Synthetic oligonucleotide
agcaccttctgtggaaaatg

SEQ ID NO: 1247 - DNA, 20 bp, Artificial Sequence
  Description of Artificial Sequence: Synthetic oligonucleotide
gcaccttctgtggaaaatgt

SEQ ID NO: 1248 - DNA, 20 bp, Artificial Sequence
  Description of Artificial Sequence: Synthetic oligonucleotide
caccttctgtggaaaatgta

SEQ ID NO: 1249 - DNA, 20 bp, Artificial Sequence
  Description of Artificial Sequence: Synthetic oligonucleotide
accttctgtggaaaatgtaa

SEQ ID NO: 1250 - DNA, 20 bp, Artificial Sequence
  Description of Artificial Sequence: Synthetic oligonucleotide
ccttctgtggaaaatgtaaa

SEQ ID NO: 1251 - DNA, 20 bp, Artificial Sequence
  Description of Artificial Sequence: Synthetic oligonucleotide
cttctgtggaaaatgtaaag

SEQ ID NO: 1252 - DNA, 20 bp, Artificial Sequence
  Description of Artificial Sequence: Synthetic oligonucleotide
ttctgtggaaaatgtaaaga

SEQ ID NO: 1253 - DNA, 20 bp, Artificial Sequence
  Description of Artificial Sequence: Synthetic oligonucleotide
tctgtggaaaatgtaaagaa

SEQ ID NO: 1254 - DNA, 20 bp, Artificial Sequence
  Description of Artificial Sequence: Synthetic oligonucleotide
ctgtggaaaatgtaaagaat

SEQ ID NO: 1255 - DNA, 20 bp, Artificial Sequence
  Description of Artificial Sequence: Synthetic oligonucleotide
tgtggaaaatgtaaagaatg

SEQ ID NO: 1256 - DNA, 20 bp, Artificial Sequence
  Description of Artificial Sequence: Synthetic oligonucleotide
gtggaaaatgtaaagaatgg

SEQ ID NO: 1257 - DNA, 20 bp, Artificial Sequence
  Description of Artificial Sequence: Synthetic oligonucleotide
tggaaaatgtaaagaatgga

SEQ ID NO: 1258 - DNA, 20 bp, Artificial Sequence
  Description of Artificial Sequence: Synthetic oligonucleotide
ggaaaatgtaaagaatggaa

SEQ ID NO: 1259 - DNA, 20 bp, Artificial Sequence
  Description of Artificial Sequence: Synthetic oligonucleotide
gaaaatgtaaagaatggaat

SEQ ID NO: 1260 - DNA, 20 bp, Artificial Sequence
  Description of Artificial Sequence: Synthetic oligonucleotide
aaaatgtaaagaatggaatc

SEQ ID NO: 1261 - DNA, 20 bp, Artificial Sequence
  Description of Artificial Sequence: Synthetic oligonucleotide
aaatgtaaagaatggaatca

SEQ ID NO: 1262 - DNA, 20 bp, Artificial Sequence
  Description of Artificial Sequence: Synthetic oligonucleotide
aatgtaaagaatggaatcag

SEQ ID NO: 1263 - DNA, 20 bp, Artificial Sequence
  Description of Artificial Sequence: Synthetic oligonucleotide
atgtaaagaatggaatcaga

SEQ ID NO: 1264 - DNA, 20 bp, Artificial Sequence
  Description of Artificial Sequence: Synthetic oligonucleotide
tgtaaagaatggaatcagaa

SEQ ID NO: 1265 - DNA, 20 bp, Artificial Sequence
  Description of Artificial Sequence: Synthetic oligonucleotide
gtaaagaatggaatcagaac

SEQ ID NO: 1266 - DNA, 20 bp, Artificial Sequence
  Description of Artificial Sequence: Synthetic oligonucleotide
taaagaatggaatcagaaca

SEQ ID NO: 1267 - DNA, 20 bp, Artificial Sequence
  Description of Artificial Sequence: Synthetic oligonucleotide
aaagaatggaatcagaacag

SEQ ID NO: 1268 - DNA, 20 bp, Artificial Sequence
  Description of Artificial Sequence: Synthetic oligonucleotide
aagaatggaatcagaacagg

SEQ ID NO: 1269 - DNA, 20 bp, Artificial Sequence
  Description of Artificial Sequence: Synthetic oligonucleotide
agaatggaatcagaacaggt

SEQ ID NO: 1270 - DNA, 20 bp, Artificial Sequence
  Description of Artificial Sequence: Synthetic oligonucleotide
gaatggaatcagaacaggtt

SEQ ID NO: 1271 - DNA, 20 bp, Artificial Sequence
  Description of Artificial Sequence: Synthetic oligonucleotide
aatggaatcagaacaggttt

SEQ ID NO: 1272 - DNA, 20 bp, Artificial Sequence
  Description of Artificial Sequence: Synthetic oligonucleotide
atggaatcagaacaggtttt

SEQ ID NO: 1273 - DNA, 20 bp, Artificial Sequence
  Description of Artificial Sequence: Synthetic oligonucleotide
tggaatcagaacaggttttc

SEQ ID NO: 1274 - DNA, 20 bp, Artificial Sequence
  Description of Artificial Sequence: Synthetic oligonucleotide
ggaatcagaacaggttttct

SEQ ID NO: 1275 - DNA, 20 bp, Artificial Sequence
  Description of Artificial Sequence: Synthetic oligonucleotide
gaatcagaacaggttttctg

SEQ ID NO: 1276 - DNA, 20 bp, Artificial Sequence
  Description of Artificial Sequence: Synthetic oligonucleotide
aatcagaacaggttttctgg

SEQ ID NO: 1277 - DNA, 20 bp, Artificial Sequence
  Description of Artificial Sequence: Synthetic oligonucleotide
atcagaacaggttttctgga

SEQ ID NO: 1278 - DNA, 20 bp, Artificial Sequence
  Description of Artificial Sequence: Synthetic oligonucleotide
tcagaacaggttttctggag

SEQ ID NO: 1279 - DNA, 20 bp, Artificial Sequence
  Description of Artificial Sequence: Synthetic oligonucleotide
cagaacaggttttctggaga

SEQ ID NO: 1280 - DNA, 20 bp, Artificial Sequence
  Description of Artificial Sequence: Synthetic oligonucleotide
agaacaggttttctggagat

SEQ ID NO: 1281 - DNA, 20 bp, Artificial Sequence
  Description of Artificial Sequence: Synthetic oligonucleotide
gaacaggttttctggagatt

SEQ ID NO: 1282 - DNA, 20 bp, Artificial Sequence
  Description of Artificial Sequence: Synthetic oligonucleotide
aacaggttttctggagattg

SEQ ID NO: 1283 - DNA, 20 bp, Artificial Sequence
  Description of Artificial Sequence: Synthetic oligonucleotide
acaggttttctggagattga

SEQ ID NO: 1284 - DNA, 20 bp, Artificial Sequence
  Description of Artificial Sequence: Synthetic oligonucleotide
caggttttctggagattgat

SEQ ID NO: 1285 - DNA, 20 bp, Artificial Sequence
  Description of Artificial Sequence: Synthetic oligonucleotide
aggttttctggagattgatg

SEQ ID NO: 1286 - DNA, 20 bp, Artificial Sequence
  Description of Artificial Sequence: Synthetic oligonucleotide
ggttttctggagattgatga

SEQ ID NO: 1287 - DNA, 20 bp, Artificial Sequence
  Description of Artificial Sequence: Synthetic oligonucleotide
gttttctggagattgatgaa

SEQ ID NO: 1288 - DNA, 20 bp, Artificial Sequence
  Description of Artificial Sequence: Synthetic oligonucleotide
ttttctggagattgatgaac

SEQ ID NO: 1289 - DNA, 20 bp, Artificial Sequence
  Description of Artificial Sequence: Synthetic oligonucleotide
tttctggagattgatgaaca

SEQ ID NO: 1290 - DNA, 20 bp, Artificial Sequence
  Description of Artificial Sequence: Synthetic oligonucleotide
ttctggagattgatgaacac

SEQ ID NO: 1291 - DNA, 20 bp, Artificial Sequence
  Description of Artificial Sequence: Synthetic oligonucleotide
tctggagattgatgaacaca

SEQ ID NO: 1292 - DNA, 20 bp, Artificial Sequence
  Description of Artificial Sequence: Synthetic oligonucleotide
ctggagattgatgaacacat

SEQ ID NO: 1293 - DNA, 20 bp, Artificial Sequence
  Description of Artificial Sequence: Synthetic oligonucleotide
tggagattgatgaacacatg

SEQ ID NO: 1294 - DNA, 20 bp, Artificial Sequence
  Description of Artificial Sequence: Synthetic oligonucleotide
ggagattgatgaacacatga

SEQ ID NO: 1295 - DNA, 20 bp, Artificial Sequence
  Description of Artificial Sequence: Synthetic oligonucleotide
gagattgatgaacacatgag

SEQ ID NO: 1296 - DNA, 20 bp, Artificial Sequence
  Description of Artificial Sequence: Synthetic oligonucleotide
agattgatgaacacatgaga

SEQ ID NO: 1297 - DNA, 20 bp, Artificial Sequence
  Description of Artificial Sequence: Synthetic oligonucleotide
gattgatgaacacatgagag

SEQ ID NO: 1298 - DNA, 20 bp, Artificial Sequence
  Description of Artificial Sequence: Synthetic oligonucleotide
attgatgaacacatgagagt

SEQ ID NO: 1299 - DNA, 20 bp, Artificial Sequence
  Description of Artificial Sequence: Synthetic oligonucleotide
ttgatgaacacatgagagtt

SEQ ID NO: 1300 - DNA, 20 bp, Artificial Sequence
  Description of Artificial Sequence: Synthetic oligonucleotide
tgatgaacacatgagagtta

SEQ ID NO: 1301 - DNA, 20 bp, Artificial Sequence
  Description of Artificial Sequence: Synthetic oligonucleotide
gatgaacacatgagagttat

SEQ ID NO: 1302 - DNA, 20 bp, Artificial Sequence
  Description of Artificial Sequence: Synthetic oligonucleotide
atgaacacatgagagttatg

SEQ ID NO: 1303 - DNA, 20 bp, Artificial Sequence
  Description of Artificial Sequence: Synthetic oligonucleotide
tgaacacatgagagttatgt

SEQ ID NO: 1304 - DNA, 20 bp, Artificial Sequence
  Description of Artificial Sequence: Synthetic oligonucleotide
gaacacatgagagttatgtc

SEQ ID NO: 1305 - DNA, 20 bp, Artificial Sequence
  Description of Artificial Sequence: Synthetic oligonucleotide
aacacatgagagttatgtca

SEQ ID NO: 1306 - DNA, 20 bp, Artificial Sequence
  Description of Artificial Sequence: Synthetic oligonucleotide
acacatgagagttatgtcag

SEQ ID NO: 1307 - DNA, 20 bp, Artificial Sequence
  Description of Artificial Sequence: Synthetic oligonucleotide
cacatgagagttatgtcaga

SEQ ID NO: 1308 - DNA, 20 bp, Artificial Sequence
  Description of Artificial Sequence: Synthetic oligonucleotide
acatgagagttatgtcagag

SEQ ID NO: 1309 - DNA, 20 bp, Artificial Sequence
  Description of Artificial Sequence: Synthetic oligonucleotide
catgagagttatgtcagaga

SEQ ID NO: 1310 - DNA, 20 bp, Artificial Sequence
  Description of Artificial Sequence: Synthetic oligonucleotide
atgagagttatgtcagagaa

SEQ ID NO: 1311 - DNA, 20 bp, Artificial Sequence
  Description of Artificial Sequence: Synthetic oligonucleotide
tgagagttatgtcagagaag

SEQ ID NO: 1312 - DNA, 20 bp, Artificial Sequence
  Description of Artificial Sequence: Synthetic oligonucleotide
gagagttatgtcagagaaga

SEQ ID NO: 1313 - DNA, 20 bp, Artificial Sequence
  Description of Artificial Sequence: Synthetic oligonucleotide
agagttatgtcagagaagaa

SEQ ID NO: 1314 - DNA, 20 bp, Artificial Sequence
  Description of Artificial Sequence: Synthetic oligonucleotide
gagttatgtcagagaagaaa

SEQ ID NO: 1315 - DNA, 20 bp, Artificial Sequence
  Description of Artificial Sequence: Synthetic oligonucleotide
agttatgtcagagaagaaac

SEQ ID NO: 1316 - DNA, 20 bp, Artificial Sequence
  Description of Artificial Sequence: Synthetic oligonucleotide
gttatgtcagagaagaaaca

SEQ ID NO: 1317 - DNA, 20 bp, Artificial Sequence
  Description of Artificial Sequence: Synthetic oligonucleotide
ttatgtcagagaagaaacat

SEQ ID NO: 1318 - DNA, 20 bp, Artificial Sequence
  Description of Artificial Sequence: Synthetic oligonucleotide
tatgtcagagaagaaacatg

SEQ ID NO: 1319 - DNA, 20 bp, Artificial Sequence
  Description of Artificial Sequence: Synthetic oligonucleotide
atgtcagagaagaaacatgg

SEQ ID NO: 1320 - DNA, 20 bp, Artificial Sequence
  Description of Artificial Sequence: Synthetic oligonucleotide
tgtcagagaagaaacatggt

SEQ ID NO: 1321 - DNA, 20 bp, Artificial Sequence
  Description of Artificial Sequence: Synthetic oligonucleotide
gtcagagaagaaacatggtg

SEQ ID NO: 1322 - DNA, 20 bp, Artificial Sequence
  Description of Artificial Sequence: Synthetic oligonucleotide
tcagagaagaaacatggtgc

SEQ ID NO: 1323 - DNA, 20 bp, Artificial Sequence
  Description of Artificial Sequence: Synthetic oligonucleotide
cagagaagaaacatggtgca

SEQ ID NO: 1324 - DNA, 20 bp, Artificial Sequence
  Description of Artificial Sequence: Synthetic oligonucleotide
agagaagaaacatggtgcag

SEQ ID NO: 1325 - DNA, 20 bp, Artificial Sequence
  Description of Artificial Sequence: Synthetic oligonucleotide
gagaagaaacatggtgcaga

SEQ ID NO: 1326 - DNA, 20 bp, Artificial Sequence
  Description of Artificial Sequence: Synthetic oligonucleotide
agaagaaacatggtgcagat

SEQ ID NO: 1327 - DNA, 20 bp, Artificial Sequence
  Description of Artificial Sequence: Synthetic oligonucleotide
gaagaaacatggtgcagata

SEQ ID NO: 1328 - DNA, 20 bp, Artificial Sequence
  Description of Artificial Sequence: Synthetic oligonucleotide
aagaaacatggtgcagatag

SEQ ID NO: 1329 - DNA, 20 bp, Artificial Sequence
  Description of Artificial Sequence: Synthetic oligonucleotide
agaaacatggtgcagataga

SEQ ID NO: 1330 - DNA, 20 bp, Artificial Sequence
  Description of Artificial Sequence: Synthetic oligonucleotide
gaaacatggtgcagatagaa

SEQ ID NO: 1331 - DNA, 20 bp, Artificial Sequence
  Description of Artificial Sequence: Synthetic oligonucleotide
aaacatggtgcagatagaag

SEQ ID NO: 1332 - DNA, 20 bp, Artificial Sequence
  Description of Artificial Sequence: Synthetic oligonucleotide
aacatggtgcagatagaagt

SEQ ID NO: 1333 - DNA, 20 bp, Artificial Sequence
  Description of Artificial Sequence: Synthetic oligonucleotide
acatggtgcagatagaagtg

SEQ ID NO: 1334 - DNA, 20 bp, Artificial Sequence
  Description of Artificial Sequence: Synthetic oligonucleotide
catggtgcagatagaagtgg

SEQ ID NO: 1335 - DNA, 20 bp, Artificial Sequence
  Description of Artificial Sequence: Synthetic oligonucleotide
atggtgcagatagaagtggg

SEQ ID NO: 1336 - DNA, 20 bp, Artificial Sequence
  Description of Artificial Sequence: Synthetic oligonucleotide
tggtgcagatagaagtgggt

SEQ ID NO: 1337 - DNA, 20 bp, Artificial Sequence
  Description of Artificial Sequence: Synthetic oligonucleotide
ggtgcagatagaagtgggtc

SEQ ID NO: 1338 - DNA, 20 bp, Artificial Sequence
  Description of Artificial Sequence: Synthetic oligonucleotide
gtgcagatagaagtgggtca

SEQ ID NO: 1339 - DNA, 20 bp, Artificial Sequence
  Description of Artificial Sequence: Synthetic oligonucleotide
tgcagatagaagtgggtcaa

SEQ ID NO: 1340 - DNA, 20 bp, Artificial Sequence
  Description of Artificial Sequence: Synthetic oligonucleotide
gcagatagaagtgggtcaac

SEQ ID NO: 1341 - DNA, 20 bp, Artificial Sequence
  Description of Artificial Sequence: Synthetic oligonucleotide
cagatagaagtgggtcaaca

SEQ ID NO: 1342 - DNA, 20 bp, Artificial Sequence
  Description of Artificial Sequence: Synthetic oligonucleotide
agatagaagtgggtcaacag

SEQ ID NO: 1343 - DNA, 20 bp, Artificial Sequence
  Description of Artificial Sequence: Synthetic oligonucleotide
gatagaagtgggtcaacagc

SEQ ID NO: 1344 - DNA, 20 bp, Artificial Sequence
  Description of Artificial Sequence: Synthetic oligonucleotide
atagaagtgggtcaacagct

SEQ ID NO: 1345 - DNA, 20 bp, Artificial Sequence
  Description of Artificial Sequence: Synthetic oligonucleotide
tagaagtgggtcaacagctg

SEQ ID NO: 1346 - DNA, 20 bp, Artificial Sequence
  Description of Artificial Sequence: Synthetic oligonucleotide
agaagtgggtcaacagctgt

SEQ ID NO: 1347 - DNA, 20 bp, Artificial Sequence
  Description of Artificial Sequence: Synthetic oligonucleotide
gaagtgggtcaacagctgta

SEQ ID NO: 1348 - DNA, 20 bp, Artificial Sequence
  Description of Artificial Sequence: Synthetic oligonucleotide
aagtgggtcaacagctgtag

SEQ ID NO: 1349 - DNA, 20 bp, Artificial Sequence
  Description of Artificial Sequence: Synthetic oligonucleotide
agtgggtcaacagctgtagg

SEQ ID NO: 1350 - DNA, 20 bp, Artificial Sequence
  Description of Artificial Sequence: Synthetic oligonucleotide
gtgggtcaacagctgtaggt

SEQ ID NO: 1351 - DNA, 20 bp, Artificial Sequence
  Description of Artificial Sequence: Synthetic oligonucleotide
tgggtcaacagctgtaggtg

SEQ ID NO: 1352 - DNA, 20 bp, Artificial Sequence
  Description of Artificial Sequence: Synthetic oligonucleotide
gggtcaacagctgtaggtgt

SEQ ID NO: 1353 - DNA, 20 bp, Artificial Sequence
  Description of Artificial Sequence: Synthetic oligonucleotide
ggtcaacagctgtaggtgtc

SEQ ID NO: 1354 - DNA, 20 bp, Artificial Sequence
  Description of Artificial Sequence: Synthetic oligonucleotide
gtcaacagctgtaggtgtct

SEQ ID NO: 1355 - DNA, 20 bp, Artificial Sequence
  Description of Artificial Sequence: Synthetic oligonucleotide
tcaacagctgtaggtgtctt

SEQ ID NO: 1356 - DNA, 20 bp, Artificial Sequence
  Description of Artificial Sequence: Synthetic oligonucleotide
caacagctgtaggtgtctta

SEQ ID NO: 1357 - DNA, 20 bp, Artificial Sequence
  Description of Artificial Sequence: Synthetic oligonucleotide
aacagctgtaggtgtcttaa

SEQ ID NO: 1358 - DNA, 20 bp, Artificial Sequence
  Description of Artificial Sequence: Synthetic oligonucleotide
acagctgtaggtgtcttaat

SEQ ID NO: 1359 - DNA, 20 bp, Artificial Sequence
  Description of Artificial Sequence: Synthetic oligonucleotide
cagctgtaggtgtcttaatt

SEQ ID NO: 1360 - DNA, 20 bp, Artificial Sequence
  Description of Artificial Sequence: Synthetic oligonucleotide
agctgtaggtgtcttaattt

SEQ ID NO: 1361 - DNA, 20 bp, Artificial Sequence
  Description of Artificial Sequence: Synthetic oligonucleotide
gctgtaggtgtcttaatttc

SEQ ID NO: 1362 - DNA, 20 bp, Artificial Sequence
  Description of Artificial Sequence: Synthetic oligonucleotide
ctgtaggtgtcttaatttct

SEQ ID NO: 1363 - DNA, 20 bp, Artificial Sequence
  Description of Artificial Sequence: Synthetic oligonucleotide
tgtaggtgtcttaatttctc

SEQ ID NO: 1364 - DNA, 20 bp, Artificial Sequence
  Description of Artificial Sequence: Synthetic oligonucleotide
gtaggtgtcttaatttctcc

SEQ ID NO: 1365 - DNA, 20 bp, Artificial Sequence
  Description of Artificial Sequence: Synthetic oligonucleotide
taggtgtcttaatttctccc

SEQ ID NO: 1366 - DNA, 20 bp, Artificial Sequence
  Description of Artificial Sequence: Synthetic oligonucleotide
aggtgtcttaatttctcccc

SEQ ID NO: 1367 - DNA, 20 bp, Artificial Sequence
  Description of Artificial Sequence: Synthetic oligonucleotide
ggtgtcttaatttctcccca

SEQ ID NO: 1368 - DNA, 20 bp, Artificial Sequence
  Description of Artificial Sequence: Synthetic oligonucleotide
gtgtcttaatttctccccaa

SEQ ID NO: 1369 - DNA, 20 bp, Artificial Sequence
  Description of Artificial Sequence: Synthetic oligonucleotide
tgtcttaatttctccccaac

SEQ ID NO: 1370 - DNA, 20 bp, Artificial Sequence
  Description of Artificial Sequence: Synthetic oligonucleotide
gtcttaatttctccccaaca

SEQ ID NO: 1371 - DNA, 20 bp, Artificial Sequence
  Description of Artificial Sequence: Synthetic oligonucleotide
tcttaatttctccccaacat

SEQ ID NO: 1372 - DNA, 20 bp, Artificial Sequence
  Description of Artificial Sequence: Synthetic oligonucleotide
cttaatttctccccaacata

SEQ ID NO: 1373 - DNA, 20 bp, Artificial Sequence
  Description of Artificial Sequence: Synthetic oligonucleotide
ttaatttctccccaacatac

SEQ ID NO: 1374 - DNA, 20 bp, Artificial Sequence
  Description of Artificial Sequence: Synthetic oligonucleotide
taatttctccccaacatact

SEQ ID NO: 1375 - DNA, 20 bp, Artificial Sequence
  Description of Artificial Sequence: Synthetic oligonucleotide
aatttctccccaacatactt

SEQ ID NO: 1376 - DNA, 20 bp, Artificial Sequence
  Description of Artificial Sequence: Synthetic oligonucleotide
atttctccccaacatactta

SEQ ID NO: 1377 - DNA, 20 bp, Artificial Sequence
  Description of Artificial Sequence: Synthetic oligonucleotide
tttctccccaacatacttat

SEQ ID NO: 1378 - DNA, 20 bp, Artificial Sequence
  Description of Artificial Sequence: Synthetic oligonucleotide
ttctccccaacatacttatt

SEQ ID NO: 1379 - DNA, 20 bp, Artificial Sequence
  Description of Artificial Sequence: Synthetic oligonucleotide
tctccccaacatacttattt

SEQ ID NO: 1380 - DNA, 20 bp, Artificial Sequence
  Description of Artificial Sequence: Synthetic oligonucleotide
ctccccaacatacttatttc

SEQ ID NO: 1381 - DNA, 20 bp, Artificial Sequence
  Description of Artificial Sequence: Synthetic oligonucleotide
tccccaacatacttatttca

SEQ ID NO: 1382 - DNA, 20 bp, Artificial Sequence
  Description of Artificial Sequence: Synthetic oligonucleotide
ccccaacatacttatttcat

SEQ ID NO: 1383 - DNA, 20 bp, Artificial Sequence
  Description of Artificial Sequence: Synthetic oligonucleotide
cccaacatacttatttcatt

SEQ ID NO: 1384 - DNA, 20 bp, Artificial Sequence
  Description of Artificial Sequence: Synthetic oligonucleotide
ccaacatacttatttcatta

SEQ ID NO: 1385 - DNA, 20 bp, Artificial Sequence
  Description of Artificial Sequence: Synthetic oligonucleotide
caacatacttatttcattaa

SEQ ID NO: 1386 - DNA, 20 bp, Artificial Sequence
  Description of Artificial Sequence: Synthetic oligonucleotide
aacatacttatttcattaac

SEQ ID NO: 1387 - DNA, 20 bp, Artificial Sequence
  Description of Artificial Sequence: Synthetic oligonucleotide
acatacttatttcattaact

SEQ ID NO: 1388 - DNA, 20 bp, Artificial Sequence
  Description of Artificial Sequence: Synthetic oligonucleotide
catacttatttcattaactg

SEQ ID NO: 1389 - DNA, 20 bp, Artificial Sequence
  Description of Artificial Sequence: Synthetic oligonucleotide
atacttatttcattaactgt

SEQ ID NO: 1390 - DNA, 20 bp, Artificial Sequence
  Description of Artificial Sequence: Synthetic oligonucleotide
tacttatttcattaactgtg

SEQ ID NO: 1391 - DNA, 20 bp, Artificial Sequence
  Description of Artificial Sequence: Synthetic oligonucleotide
acttatttcattaactgtgg

SEQ ID NO: 1392 - DNA, 20 bp, Artificial Sequence
  Description of Artificial Sequence: Synthetic oligonucleotide
cttatttcattaactgtgga

SEQ ID NO: 1393 - DNA, 20 bp, Artificial Sequence
  Description of Artificial Sequence: Synthetic oligonucleotide
ttatttcattaactgtggag

SEQ ID NO: 1394 - DNA, 20 bp, Artificial Sequence
  Description of Artificial Sequence: Synthetic oligonucleotide
tatttcattaactgtggaga

SEQ ID NO: 1395 - DNA, 20 bp, Artificial Sequence
  Description of Artificial Sequence: Synthetic oligonucleotide
atttcattaactgtggagac

SEQ ID NO: 1396 - DNA, 20 bp, Artificial Sequence
  Description of Artificial Sequence: Synthetic oligonucleotide
tttcattaactgtggagact

SEQ ID NO: 1397 - DNA, 20 bp, Artificial Sequence
  Description of Artificial Sequence: Synthetic oligonucleotide
ttcattaactgtggagactc

SEQ ID NO: 1398 - DNA, 20 bp, Artificial Sequence
  Description of Artificial Sequence: Synthetic oligonucleotide
tcattaactgtggagactca

SEQ ID NO: 1399 - DNA, 20 bp, Artificial Sequence
  Description of Artificial Sequence: Synthetic oligonucleotide
cattaactgtggagactcaa

SEQ ID NO: 1400 - DNA, 20 bp, Artificial Sequence
  Description of Artificial Sequence: Synthetic oligonucleotide
attaactgtggagactcaag

SEQ ID NO: 1401 - DNA, 20 bp, Artificial Sequence
  Description of Artificial Sequence: Synthetic oligonucleotide
ttaactgtggagactcaaga

SEQ ID NO: 1402 - DNA, 20 bp, Artificial Sequence
  Description of Artificial Sequence: Synthetic oligonucleotide
taactgtggagactcaagag

SEQ ID NO: 1403 - DNA, 20 bp, Artificial Sequence
  Description of Artificial Sequence: Synthetic oligonucleotide
aactgtggagactcaagagg

SEQ ID NO: 1404 - DNA, 20 bp, Artificial Sequence
  Description of Artificial Sequence: Synthetic oligonucleotide
actgtggagactcaagaggt

SEQ ID NO: 1405 - DNA, 20 bp, Artificial Sequence
  Description of Artificial Sequence: Synthetic oligonucleotide
ctgtggagactcaagaggtt

SEQ ID NO: 1406 - DNA, 20 bp, Artificial Sequence
  Description of Artificial Sequence: Synthetic oligonucleotide
tgtggagactcaagaggttt

SEQ ID NO: 1407 - DNA, 20 bp, Artificial Sequence
  Description of Artificial Sequence: Synthetic oligonucleotide
gtggagactcaagaggttta

SEQ ID NO: 1408 - DNA, 20 bp, Artificial Sequence
  Description of Artificial Sequence: Synthetic oligonucleotide
tggagactcaagaggtttac

SEQ ID NO: 1409 - DNA, 20 bp, Artificial Sequence
  Description of Artificial Sequence: Synthetic oligonucleotide
ggagactcaagaggtttact

SEQ ID NO: 1410 - DNA, 20 bp, Artificial Sequence
  Description of Artificial Sequence: Synthetic oligonucleotide
gagactcaagaggtttactt

SEQ ID NO: 1411 - DNA, 20 bp, Artificial Sequence
  Description of Artificial Sequence: Synthetic oligonucleotide
agactcaagaggtttacttt

SEQ ID NO: 1412 - DNA, 20 bp, Artificial Sequence
  Description of Artificial Sequence: Synthetic oligonucleotide
gactcaagaggtttactttg

SEQ ID NO: 1413 - DNA, 20 bp, Artificial Sequence
  Description of Artificial Sequence: Synthetic oligonucleotide
actcaagaggtttactttgt

SEQ ID NO: 1414 - DNA, 20 bp, Artificial Sequence
  Description of Artificial Sequence: Synthetic oligonucleotide
ctcaagaggtttactttgta

SEQ ID NO: 1415 - DNA, 20 bp, Artificial Sequence
  Description of Artificial Sequence: Synthetic oligonucleotide
tcaagaggtttactttgtag

SEQ ID NO: 1416 - DNA, 20 bp, Artificial Sequence
  Description of Artificial Sequence: Synthetic oligonucleotide
caagaggtttactttgtagg

SEQ ID NO: 1417 - DNA, 20 bp, Artificial Sequence
  Description of Artificial Sequence: Synthetic oligonucleotide
aagaggtttactttgtagga

SEQ ID NO: 1418 - DNA, 20 bp, Artificial Sequence
  Description of Artificial Sequence: Synthetic oligonucleotide
agaggtttactttgtaggaa

SEQ ID NO: 1419 - DNA, 20 bp, Artificial Sequence
  Description of Artificial Sequence: Synthetic oligonucleotide
gaggtttactttgtaggaac

SEQ ID NO: 1420 - DNA, 20 bp, Artificial Sequence
  Description of Artificial Sequence: Synthetic oligonucleotide
aggtttactttgtaggaaca

SEQ ID NO: 1421 - DNA, 20 bp, Artificial Sequence
  Description of Artificial Sequence: Synthetic oligonucleotide
ggtttactttgtaggaacag

SEQ ID NO: 1422 - DNA, 20 bp, Artificial Sequence
  Description of Artificial Sequence: Synthetic oligonucleotide
gtttactttgtaggaacagg

SEQ ID NO: 1423 - DNA, 20 bp, Artificial Sequence
  Description of Artificial Sequence: Synthetic oligonucleotide
tttactttgtaggaacagga

SEQ ID NO: 1424 - DNA, 20 bp, Artificial Sequence
  Description of Artificial Sequence: Synthetic oligonucleotide
ttactttgtaggaacaggaa

SEQ ID NO: 1425 - DNA, 20 bp, Artificial Sequence
  Description of Artificial Sequence: Synthetic oligonucleotide
tactttgtaggaacaggaaa

SEQ ID NO: 1426 - DNA, 20 bp, Artificial Sequence
  Description of Artificial Sequence: Synthetic oligonucleotide
actttgtaggaacaggaaag

SEQ ID NO: 1427 - DNA, 20 bp, Artificial Sequence
  Description of Artificial Sequence: Synthetic oligonucleotide
ctttgtaggaacaggaaagt

SEQ ID NO: 1428 - DNA, 20 bp, Artificial Sequence
  Description of Artificial Sequence: Synthetic oligonucleotide
tttgtaggaacaggaaagtt

SEQ ID NO: 1429 - DNA, 20 bp, Artificial Sequence
  Description of Artificial Sequence: Synthetic oligonucleotide
ttgtaggaacaggaaagttc

SEQ ID NO: 1430 - DNA, 20 bp, Artificial Sequence
  Description of Artificial Sequence: Synthetic oligonucleotide
tgtaggaacaggaaagttca

SEQ ID NO: 1431 - DNA, 20 bp, Artificial Sequence
  Description of Artificial Sequence: Synthetic oligonucleotide
gtaggaacaggaaagttcat

SEQ ID NO: 1432 - DNA, 20 bp, Artificial Sequence
  Description of Artificial Sequence: Synthetic oligonucleotide
taggaacaggaaagttcatt

SEQ ID NO: 1433 - DNA, 20 bp, Artificial Sequence
  Description of Artificial Sequence: Synthetic oligonucleotide
aggaacaggaaagttcattt

SEQ ID NO: 1434 - DNA, 20 bp, Artificial Sequence
  Description of Artificial Sequence: Synthetic oligonucleotide
ggaacaggaaagttcatttc

SEQ ID NO: 1435 - DNA, 20 bp, Artificial Sequence
  Description of Artificial Sequence: Synthetic oligonucleotide
gaacaggaaagttcatttct

SEQ ID NO: 1436 - DNA, 20 bp, Artificial Sequence
  Description of Artificial Sequence: Synthetic oligonucleotide
aacaggaaagttcatttctt

SEQ ID NO: 1437 - DNA, 20 bp, Artificial Sequence
  Description of Artificial Sequence: Synthetic oligonucleotide
acaggaaagttcatttcttc

SEQ ID NO: 1438 - DNA, 20 bp, Artificial Sequence
  Description of Artificial Sequence: Synthetic oligonucleotide
caggaaagttcatttcttca

SEQ ID NO: 1439 - DNA, 20 bp, Artificial Sequence
  Description of Artificial Sequence: Synthetic oligonucleotide
aggaaagttcatttcttcac

SEQ ID NO: 1440 - DNA, 20 bp, Artificial Sequence
  Description of Artificial Sequence: Synthetic oligonucleotide
ggaaagttcatttcttcaca

SEQ ID NO: 1441 - DNA, 20 bp, Artificial Sequence
  Description of Artificial Sequence: Synthetic oligonucleotide
gaaagttcatttcttcacac

SEQ ID NO: 1442 - DNA, 20 bp, Artificial Sequence
  Description of Artificial Sequence: Synthetic oligonucleotide
aaagttcatttcttcacaca

SEQ ID NO: 1443 - DNA, 20 bp, Artificial Sequence
  Description of Artificial Sequence: Synthetic oligonucleotide
aagttcatttcttcacacaa

SEQ ID NO: 1444 - DNA, 20 bp, Artificial Sequence
  Description of Artificial Sequence: Synthetic oligonucleotide
agttcatttcttcacacaag

SEQ ID NO: 1445 - DNA, 20 bp, Artificial Sequence
  Description of Artificial Sequence: Synthetic oligonucleotide
gttcatttcttcacacaaga

SEQ ID NO: 1446 - DNA, 20 bp, Artificial Sequence
  Description of Artificial Sequence: Synthetic oligonucleotide
ttcatttcttcacacaagat

SEQ ID NO: 1447 - DNA, 20 bp, Artificial Sequence
  Description of Artificial Sequence: Synthetic oligonucleotide
tcatttcttcacacaagatc

SEQ ID NO: 1448 - DNA, 20 bp, Artificial Sequence
  Description of Artificial Sequence: Synthetic oligonucleotide
catttcttcacacaagatca

SEQ ID NO: 1449 - DNA, 20 bp, Artificial Sequence
  Description of Artificial Sequence: Synthetic oligonucleotide
atttcttcacacaagatcac

SEQ ID NO: 1450 - DNA, 20 bp, Artificial Sequence
  Description of Artificial Sequence: Synthetic oligonucleotide
tttcttcacacaagatcaca

SEQ ID NO: 1451 - DNA, 20 bp, Artificial Sequence
  Description of Artificial Sequence: Synthetic oligonucleotide
ttcttcacacaagatcacaa

SEQ ID NO: 1452 - DNA, 20 bp, Artificial Sequence
  Description of Artificial Sequence: Synthetic oligonucleotide
tcttcacacaagatcacaaa

SEQ ID NO: 1453 - DNA, 20 bp, Artificial Sequence
  Description of Artificial Sequence: Synthetic oligonucleotide
cttcacacaagatcacaaac

SEQ ID NO: 1454 - DNA, 20 bp, Artificial Sequence
  Description of Artificial Sequence: Synthetic oligonucleotide
ttcacacaagatcacaaacc

SEQ ID NO: 1455 - DNA, 20 bp, Artificial Sequence
  Description of Artificial Sequence: Synthetic oligonucleotide
tcacacaagatcacaaacca

SEQ ID NO: 1456 - DNA, 20 bp, Artificial Sequence
  Description of Artificial Sequence: Synthetic oligonucleotide
cacacaagatcacaaaccaa

SEQ ID NO: 1457 - DNA, 20 bp, Artificial Sequence
  Description of Artificial Sequence: Synthetic oligonucleotide
acacaagatcacaaaccaag

SEQ ID NO: 1458 - DNA, 20 bp, Artificial Sequence
  Description of Artificial Sequence: Synthetic oligonucleotide
cacaagatcacaaaccaagt

SEQ ID NO: 1459 - DNA, 20 bp, Artificial Sequence
  Description of Artificial Sequence: Synthetic oligonucleotide
acaagatcacaaaccaagta

SEQ ID NO: 1460 - DNA, 20 bp, Artificial Sequence
  Description of Artificial Sequence: Synthetic oligonucleotide
caagatcacaaaccaagtaa

SEQ ID NO: 1461 - DNA, 20 bp, Artificial Sequence
  Description of Artificial Sequence: Synthetic oligonucleotide
aagatcacaaaccaagtaat

SEQ ID NO: 1462 - DNA, 20 bp, Artificial Sequence
  Description of Artificial Sequence: Synthetic oligonucleotide
agatcacaaaccaagtaatc

SEQ ID NO: 1463 - DNA, 20 bp, Artificial Sequence
  Description of Artificial Sequence: Synthetic oligonucleotide
gatcacaaaccaagtaatcc

SEQ ID NO: 1464 - DNA, 20 bp, Artificial Sequence
  Description of Artificial Sequence: Synthetic oligonucleotide
atcacaaaccaagtaatccg

SEQ ID NO: 1465 - DNA, 20 bp, Artificial Sequence
  Description of Artificial Sequence: Synthetic oligonucleotide
tcacaaaccaagtaatccgc

SEQ ID NO: 1466 - DNA, 20 bp, Artificial Sequence
  Description of Artificial Sequence: Synthetic oligonucleotide
cacaaaccaagtaatccgct

SEQ ID NO: 1467 - DNA, 20 bp, Artificial Sequence
  Description of Artificial Sequence: Synthetic oligonucleotide
acaaaccaagtaatccgctg

SEQ ID NO: 1468 - DNA, 20 bp, Artificial Sequence
  Description of Artificial Sequence: Synthetic oligonucleotide
caaaccaagtaatccgctgg

SEQ ID NO: 1469 - DNA, 20 bp, Artificial Sequence
  Description of Artificial Sequence: Synthetic oligonucleotide
aaaccaagtaatccgctgga

SEQ ID NO: 1470 - DNA, 20 bp, Artificial Sequence
  Description of Artificial Sequence: Synthetic oligonucleotide
aaccaagtaatccgctggag

SEQ ID NO: 1471 - DNA, 20 bp, Artificial Sequence
  Description of Artificial Sequence: Synthetic oligonucleotide
accaagtaatccgctggaga

SEQ ID NO: 1472 - DNA, 20 bp, Artificial Sequence
  Description of Artificial Sequence: Synthetic oligonucleotide
ccaagtaatccgctggagaa

SEQ ID NO: 1473 - DNA, 20 bp, Artificial Sequence
  Description of Artificial Sequence: Synthetic oligonucleotide
caagtaatccgctggagaaa

SEQ ID NO: 1474 - DNA, 20 bp, Artificial Sequence
  Description of Artificial Sequence: Synthetic oligonucleotide
aagtaatccgctggagaaag

SEQ ID NO: 1475 - DNA, 20 bp, Artificial Sequence
  Description of Artificial Sequence: Synthetic oligonucleotide
agtaatccgctggagaaaga

SEQ ID NO: 1476 - DNA, 20 bp, Artificial Sequence
  Description of Artificial Sequence: Synthetic oligonucleotide
gtaatccgctggagaaagaa

SEQ ID NO: 1477 - DNA, 20 bp, Artificial Sequence
  Description of Artificial Sequence: Synthetic oligonucleotide
taatccgctggagaaagaac

SEQ ID NO: 1478 - DNA, 20 bp, Artificial Sequence
  Description of Artificial Sequence: Synthetic oligonucleotide
aatccgctggagaaagaacg

SEQ ID NO: 1479 - DNA, 20 bp, Artificial Sequence
  Description of Artificial Sequence: Synthetic oligonucleotide
atccgctggagaaagaacga

SEQ ID NO: 1480 - DNA, 20 bp, Artificial Sequence
  Description of Artificial Sequence: Synthetic oligonucleotide
tccgctggagaaagaacgaa

SEQ ID NO: 1481 - DNA, 20 bp, Artificial Sequence
  Description of Artificial Sequence: Synthetic oligonucleotide
ccgctggagaaagaacgaat

SEQ ID NO: 1482 - DNA, 20 bp, Artificial Sequence
  Description of Artificial Sequence: Synthetic oligonucleotide
cgctggagaaagaacgaatt

SEQ ID NO: 1483 - DNA, 20 bp, Artificial Sequence
  Description of Artificial Sequence: Synthetic oligonucleotide
gctggagaaagaacgaattc

SEQ ID NO: 1484 - DNA, 20 bp, Artificial Sequence
  Description of Artificial Sequence: Synthetic oligonucleotide
ctggagaaagaacgaattca

SEQ ID NO: 1485 - DNA, 20 bp, Artificial Sequence
  Description of Artificial Sequence: Synthetic oligonucleotide
tggagaaagaacgaattcag

SEQ ID NO: 1486 - DNA, 20 bp, Artificial Sequence
  Description of Artificial Sequence: Synthetic oligonucleotide
ggagaaagaacgaattcaga

SEQ ID NO: 1487 - DNA, 20 bp, Artificial Sequence
  Description of Artificial Sequence: Synthetic oligonucleotide
gagaaagaacgaattcagaa

SEQ ID NO: 1488 - DNA, 20 bp, Artificial Sequence
  Description of Artificial Sequence: Synthetic oligonucleotide
agaaagaacgaattcagaat

SEQ ID NO: 1489 - DNA, 20 bp, Artificial Sequence
  Description of Artificial Sequence: Synthetic oligonucleotide
gaaagaacgaattcagaatg

SEQ ID NO: 1490 - DNA, 20 bp, Artificial Sequence
  Description of Artificial Sequence: Synthetic oligonucleotide
aaagaacgaattcagaatgc

SEQ ID NO: 1491 - DNA, 20 bp, Artificial Sequence
  Description of Artificial Sequence: Synthetic oligonucleotide
aagaacgaattcagaatgca

SEQ ID NO: 1492 - DNA, 20 bp, Artificial Sequence
  Description of Artificial Sequence: Synthetic oligonucleotide
agaacgaattcagaatgcag

SEQ ID NO: 1493 - DNA, 20 bp, Artificial Sequence
  Description of Artificial Sequence: Synthetic oligonucleotide
gaacgaattcagaatgcagg

SEQ ID NO: 1494 - DNA, 20 bp, Artificial Sequence
  Description of Artificial Sequence: Synthetic oligonucleotide
aacgaattcagaatgcaggt

SEQ ID NO: 1495 - DNA, 20 bp, Artificial Sequence
  Description of Artificial Sequence: Synthetic oligonucleotide
acgaattcagaatgcaggtg

SEQ ID NO: 1496 - DNA, 20 bp, Artificial Sequence
  Description of Artificial Sequence: Synthetic oligonucleotide
cgaattcagaatgcaggtgg

SEQ ID NO: 1497 - DNA, 20 bp, Artificial Sequence
  Description of Artificial Sequence: Synthetic oligonucleotide
gaattcagaatgcaggtggc

SEQ ID NO: 1498 - DNA, 20 bp, Artificial Sequence
  Description of Artificial Sequence: Synthetic oligonucleotide
aattcagaatgcaggtggct

SEQ ID NO: 1499 - DNA, 20 bp, Artificial Sequence
  Description of Artificial Sequence: Synthetic oligonucleotide
attcagaatgcaggtggctc

SEQ ID NO: 1500 - DNA, 20 bp, Artificial Sequence
  Description of Artificial Sequence: Synthetic oligonucleotide
ttcagaatgcaggtggctct

SEQ ID NO: 1501 - DNA, 20 bp, Artificial Sequence
  Description of Artificial Sequence: Synthetic oligonucleotide
tcagaatgcaggtggctctg

SEQ ID NO: 1502 - DNA, 20 bp, Artificial Sequence
  Description of Artificial Sequence: Synthetic oligonucleotide
cagaatgcaggtggctctgt

SEQ ID NO: 1503 - DNA, 20 bp, Artificial Sequence
  Description of Artificial Sequence: Synthetic oligonucleotide
agaatgcaggtggctctgta

SEQ ID NO: 1504 - DNA, 20 bp, Artificial Sequence
  Description of Artificial Sequence: Synthetic oligonucleotide
gaatgcaggtggctctgtaa

SEQ ID NO: 1505 - DNA, 20 bp, Artificial Sequence
  Description of Artificial Sequence: Synthetic oligonucleotide
aatgcaggtggctctgtaat

SEQ ID NO: 1506 - DNA, 20 bp, Artificial Sequence
  Description of Artificial Sequence: Synthetic oligonucleotide
atgcaggtggctctgtaatg

SEQ ID NO: 1507 - DNA, 20 bp, Artificial Sequence
  Description of Artificial Sequence: Synthetic oligonucleotide
tgcaggtggctctgtaatga

SEQ ID NO: 1508 - DNA, 20 bp, Artificial Sequence
  Description of Artificial Sequence: Synthetic oligonucleotide
gcaggtggctctgtaatgat

SEQ ID NO: 1509 - DNA, 20 bp, Artificial Sequence
  Description of Artificial Sequence: Synthetic oligonucleotide
caggtggctctgtaatgatt

SEQ ID NO: 1510 - DNA, 20 bp, Artificial Sequence
  Description of Artificial Sequence: Synthetic oligonucleotide
aggtggctctgtaatgattc

SEQ ID NO: 1511 - DNA, 20 bp, Artificial Sequence
  Description of Artificial Sequence: Synthetic oligonucleotide
ggtggctctgtaatgattca

SEQ ID NO: 1512 - DNA, 20 bp, Artificial Sequence
  Description of Artificial Sequence: Synthetic oligonucleotide
gtggctctgtaatgattcag

SEQ ID NO: 1513 - DNA, 20 bp, Artificial Sequence
  Description of Artificial Sequence: Synthetic oligonucleotide
tggctctgtaatgattcagc

SEQ ID NO: 1514 - DNA, 20 bp, Artificial Sequence
  Description of Artificial Sequence: Synthetic oligonucleotide
ggctctgtaatgattcagcg

SEQ ID NO: 1515 - DNA, 20 bp, Artificial Sequence
  Description of Artificial Sequence: Synthetic oligonucleotide
gctctgtaatgattcagcgt

SEQ ID NO: 1516 - DNA, 20 bp, Artificial Sequence
  Description of Artificial Sequence: Synthetic oligonucleotide
ctctgtaatgattcagcgtg

SEQ ID NO: 1517 - DNA, 20 bp, Artificial Sequence
  Description of Artificial Sequence: Synthetic oligonucleotide
tctgtaatgattcagcgtgt

SEQ ID NO: 1518 - DNA, 20 bp, Artificial Sequence
  Description of Artificial Sequence: Synthetic oligonucleotide
ctgtaatgattcagcgtgtg

SEQ ID NO: 1519 - DNA, 20 bp, Artificial Sequence
  Description of Artificial Sequence: Synthetic oligonucleotide
tgtaatgattcagcgtgtga

SEQ ID NO: 1520 - DNA, 20 bp, Artificial Sequence
  Description of Artificial Sequence: Synthetic oligonucleotide
gtaatgattcagcgtgtgaa

SEQ ID NO: 1521 - DNA, 20 bp, Artificial Sequence
  Description of Artificial Sequence: Synthetic oligonucleotide
taatgattcagcgtgtgaat

SEQ ID NO: 1522 - DNA, 20 bp, Artificial Sequence
  Description of Artificial Sequence: Synthetic oligonucleotide
aatgattcagcgtgtgaatg

SEQ ID NO: 1523 - DNA, 20 bp, Artificial Sequence
  Description of Artificial Sequence: Synthetic oligonucleotide
atgattcagcgtgtgaatgg

SEQ ID NO: 1524 - DNA, 20 bp, Artificial Sequence
  Description of Artificial Sequence: Synthetic oligonucleotide
tgattcagcgtgtgaatggc

SEQ ID NO: 1525 - DNA, 20 bp, Artificial Sequence
  Description of Artificial Sequence: Synthetic oligonucleotide
gattcagcgtgtgaatggct

SEQ ID NO: 1526 - DNA, 20 bp, Artificial Sequence
  Description of Artificial Sequence: Synthetic oligonucleotide
attcagcgtgtgaatggctc

SEQ ID NO: 1527 - DNA, 20 bp, Artificial Sequence
  Description of Artificial Sequence: Synthetic oligonucleotide
ttcagcgtgtgaatggctct

SEQ ID NO: 1528 - DNA, 20 bp, Artificial Sequence
  Description of Artificial Sequence: Synthetic oligonucleotide
tcagcgtgtgaatggctctc

SEQ ID NO: 1529 - DNA, 20 bp, Artificial Sequence
  Description of Artificial Sequence: Synthetic oligonucleotide
cagcgtgtgaatggctctct

SEQ ID NO: 1530 - DNA, 20 bp, Artificial Sequence
  Description of Artificial Sequence: Synthetic oligonucleotide
agcgtgtgaatggctctctg

SEQ ID NO: 1531 - DNA, 20 bp, Artificial Sequence
  Description of Artificial Sequence: Synthetic oligonucleotide
gcgtgtgaatggctctctgg

SEQ ID NO: 1532 - DNA, 20 bp, Artificial Sequence
  Description of Artificial Sequence: Synthetic oligonucleotide
cgtgtgaatggctctctggc

SEQ ID NO: 1533 - DNA, 20 bp, Artificial Sequence
  Description of Artificial Sequence: Synthetic oligonucleotide
gtgtgaatggctctctggct

SEQ ID NO: 1534 - DNA, 20 bp, Artificial Sequence
  Description of Artificial Sequence: Synthetic oligonucleotide
tgtgaatggctctctggctg

SEQ ID NO: 1535 - DNA, 20 bp, Artificial Sequence
  Description of Artificial Sequence: Synthetic oligonucleotide
gtgaatggctctctggctgt

SEQ ID NO: 1536 - DNA, 20 bp, Artificial Sequence
  Description of Artificial Sequence: Synthetic oligonucleotide
tgaatggctctctggctgta

SEQ ID NO: 1537 - DNA, 20 bp, Artificial Sequence
  Description of Artificial Sequence: Synthetic oligonucleotide
gaatggctctctggctgtat

SEQ ID NO: 1538 - DNA, 20 bp, Artificial Sequence
  Description of Artificial Sequence: Synthetic oligonucleotide
aatggctctctggctgtatc

SEQ ID NO: 1539 - DNA, 20 bp, Artificial Sequence
  Description of Artificial Sequence: Synthetic oligonucleotide
atggctctctggctgtatcg

SEQ ID NO: 1540 - DNA, 20 bp, Artificial Sequence
  Description of Artificial Sequence: Synthetic oligonucleotide
tggctctctggctgtatcga

SEQ ID NO: 1541 - DNA, 20 bp, Artificial Sequence
  Description of Artificial Sequence: Synthetic oligonucleotide
ggctctctggctgtatcgag

SEQ ID NO: 1542 - DNA, 20 bp, Artificial Sequence
  Description of Artificial Sequence: Synthetic oligonucleotide
gctctctggctgtatcgagg

SEQ ID NO: 1543 - DNA, 20 bp, Artificial Sequence
  Description of Artificial Sequence: Synthetic oligonucleotide
ctctctggctgtatcgaggg

SEQ ID NO: 1544 - DNA, 20 bp, Artificial Sequence
  Description of Artificial Sequence: Synthetic oligonucleotide
tctctggctgtatcgagggc

SEQ ID NO: 1545 - DNA, 20 bp, Artificial Sequence
  Description of Artificial Sequence: Synthetic oligonucleotide
ctctggctgtatcgagggcc

SEQ ID NO: 1546 - DNA, 20 bp, Artificial Sequence
  Description of Artificial Sequence: Synthetic oligonucleotide
tctggctgtatcgagggccc

SEQ ID NO: 1547 - DNA, 20 bp, Artificial Sequence
  Description of Artificial Sequence: Synthetic oligonucleotide
ctggctgtatcgagggccct

SEQ ID NO: 1548 - DNA, 20 bp, Artificial Sequence
  Description of Artificial Sequence: Synthetic oligonucleotide
tggctgtatcgagggccctt

SEQ ID NO: 1549 - DNA, 20 bp, Artificial Sequence
  Description of Artificial Sequence: Synthetic oligonucleotide
ggctgtatcgagggcccttg

SEQ ID NO: 1550 - DNA, 20 bp, Artificial Sequence
  Description of Artificial Sequence: Synthetic oligonucleotide
gctgtatcgagggcccttgg

SEQ ID NO: 1551 - DNA, 20 bp, Artificial Sequence
  Description of Artificial Sequence: Synthetic oligonucleotide
ctgtatcgagggcccttggg

SEQ ID NO: 1552 - DNA, 20 bp, Artificial Sequence
  Description of Artificial Sequence: Synthetic oligonucleotide
tgtatcgagggcccttgggg

SEQ ID NO: 1553 - DNA, 20 bp, Artificial Sequence
  Description of Artificial Sequence: Synthetic oligonucleotide
gtatcgagggcccttgggga

SEQ ID NO: 1554 - DNA, 20 bp, Artificial Sequence
  Description of Artificial Sequence: Synthetic oligonucleotide
tatcgagggcccttggggat

SEQ ID NO: 1555 - DNA, 20 bp, Artificial Sequence
  Description of Artificial Sequence: Synthetic oligonucleotide
atcgagggcccttggggatt

SEQ ID NO: 1556 - DNA, 20 bp, Artificial Sequence
  Description of Artificial Sequence: Synthetic oligonucleotide
tcgagggcccttggggattt

SEQ ID NO: 1557 - DNA, 20 bp, Artificial Sequence
  Description of Artificial Sequence: Synthetic oligonucleotide
cgagggcccttggggatttt

SEQ ID NO: 1558 - DNA, 20 bp, Artificial Sequence
  Description of Artificial Sequence: Synthetic oligonucleotide
gagggcccttggggattttg

SEQ ID NO: 1559 - DNA, 20 bp, Artificial Sequence
  Description of Artificial Sequence: Synthetic oligonucleotide
agggcccttggggattttga

SEQ ID NO: 1560 - DNA, 20 bp, Artificial Sequence
  Description of Artificial Sequence: Synthetic oligonucleotide
gggcccttggggattttgat

SEQ ID NO: 1561 - DNA, 20 bp, Artificial Sequence
  Description of Artificial Sequence: Synthetic oligonucleotide
ggcccttggggattttgatt

SEQ ID NO: 1562 - DNA, 20 bp, Artificial Sequence
  Description of Artificial Sequence: Synthetic oligonucleotide
gcccttggggattttgatta

SEQ ID NO: 1563 - DNA, 20 bp, Artificial Sequence
  Description of Artificial Sequence: Synthetic oligonucleotide
cccttggggattttgattac

SEQ ID NO: 1564 - DNA, 20 bp, Artificial Sequence
  Description of Artificial Sequence: Synthetic oligonucleotide
ccttggggattttgattaca

SEQ ID NO: 1565 - DNA, 20 bp, Artificial Sequence
  Description of Artificial Sequence: Synthetic oligonucleotide
cttggggattttgattacaa

SEQ ID NO: 1566 - DNA, 20 bp, Artificial Sequence
  Description of Artificial Sequence: Synthetic oligonucleotide
ttggggattttgattacaaa

SEQ ID NO: 1567 - DNA, 20 bp, Artificial Sequence
  Description of Artificial Sequence: Synthetic oligonucleotide
tggggattttgattacaaat

SEQ ID NO: 1568 - DNA, 20 bp, Artificial Sequence
  Description of Artificial Sequence: Synthetic oligonucleotide
ggggattttgattacaaatg

SEQ ID NO: 1569 - DNA, 20 bp, Artificial Sequence
  Description of Artificial Sequence: Synthetic oligonucleotide
gggattttgattacaaatgt

SEQ ID NO: 1570 - DNA, 20 bp, Artificial Sequence
  Description of Artificial Sequence: Synthetic oligonucleotide
ggattttgattacaaatgtg

SEQ ID NO: 1571 - DNA, 20 bp, Artificial Sequence
  Description of Artificial Sequence: Synthetic oligonucleotide
gattttgattacaaatgtgt

SEQ ID NO: 1572 - DNA, 20 bp, Artificial Sequence
  Description of Artificial Sequence: Synthetic oligonucleotide
attttgattacaaatgtgtc

SEQ ID NO: 1573 - DNA, 20 bp, Artificial Sequence
  Description of Artificial Sequence: Synthetic oligonucleotide
ttttgattacaaatgtgtcc

SEQ ID NO: 1574 - DNA, 20 bp, Artificial Sequence
  Description of Artificial Sequence: Synthetic oligonucleotide
tttgattacaaatgtgtcca

SEQ ID NO: 1575 - DNA, 20 bp, Artificial Sequence
  Description of Artificial Sequence: Synthetic oligonucleotide
ttgattacaaatgtgtccat

SEQ ID NO: 1576 - DNA, 20 bp, Artificial Sequence
  Description of Artificial Sequence: Synthetic oligonucleotide
tgattacaaatgtgtccatg

SEQ ID NO: 1577 - DNA, 20 bp, Artificial Sequence
  Description of Artificial Sequence: Synthetic oligonucleotide
gattacaaatgtgtccatgg

SEQ ID NO: 1578 - DNA, 20 bp, Artificial Sequence
  Description of Artificial Sequence: Synthetic oligonucleotide
attacaaatgtgtccatgga

SEQ ID NO: 1579 - DNA, 20 bp, Artificial Sequence
  Description of Artificial Sequence: Synthetic oligonucleotide
ttacaaatgtgtccatggaa

SEQ ID NO: 1580 - DNA, 20 bp, Artificial Sequence
  Description of Artificial Sequence: Synthetic oligonucleotide
tacaaatgtgtccatggaaa

SEQ ID NO: 1581 - DNA, 20 bp, Artificial Sequence
  Description of Artificial Sequence: Synthetic oligonucleotide
acaaatgtgtccatggaaaa

SEQ ID NO: 1582 - DNA, 20 bp, Artificial Sequence
  Description of Artificial Sequence: Synthetic oligonucleotide
caaatgtgtccatggaaaag

SEQ ID NO: 1583 - DNA, 20 bp, Artificial Sequence
  Description of Artificial Sequence: Synthetic oligonucleotide
aaatgtgtccatggaaaagg

SEQ ID NO: 1584 - DNA, 20 bp, Artificial Sequence
  Description of Artificial Sequence: Synthetic oligonucleotide
aatgtgtccatggaaaaggt

SEQ ID NO: 1585 - DNA, 20 bp, Artificial Sequence
  Description of Artificial Sequence: Synthetic oligonucleotide
atgtgtccatggaaaaggtc

SEQ ID NO: 1586 - DNA, 20 bp, Artificial Sequence
  Description of Artificial Sequence: Synthetic oligonucleotide
tgtgtccatggaaaaggtcc

SEQ ID NO: 1587 - DNA, 20 bp, Artificial Sequence
  Description of Artificial Sequence: Synthetic oligonucleotide
gtgtccatggaaaaggtcct

SEQ ID NO: 1588 - DNA, 20 bp, Artificial Sequence
  Description of Artificial Sequence: Synthetic oligonucleotide
tgtccatggaaaaggtccta

SEQ ID NO: 1589 - DNA, 20 bp, Artificial Sequence
  Description of Artificial Sequence: Synthetic oligonucleotide
gtccatggaaaaggtcctac

SEQ ID NO: 1590 - DNA, 20 bp, Artificial Sequence
  Description of Artificial Sequence: Synthetic oligonucleotide
tccatggaaaaggtcctact

SEQ ID NO: 1591 - DNA, 20 bp, Artificial Sequence
  Description of Artificial Sequence: Synthetic oligonucleotide
ccatggaaaaggtcctactg

SEQ ID NO: 1592 - DNA, 20 bp, Artificial Sequence
  Description of Artificial Sequence: Synthetic oligonucleotide
catggaaaaggtcctactga

SEQ ID NO: 1593 - DNA, 20 bp, Artificial Sequence
  Description of Artificial Sequence: Synthetic oligonucleotide
atggaaaaggtcctactgag

SEQ ID NO: 1594 - DNA, 20 bp, Artificial Sequence
  Description of Artificial Sequence: Synthetic oligonucleotide
tggaaaaggtcctactgagc

SEQ ID NO: 1595 - DNA, 20 bp, Artificial Sequence
  Description of Artificial Sequence: Synthetic oligonucleotide
ggaaaaggtcctactgagca

SEQ ID NO: 1596 - DNA, 20 bp, Artificial Sequence
  Description of Artificial Sequence: Synthetic oligonucleotide
gaaaaggtcctactgagcag

SEQ ID NO: 1597 - DNA, 20 bp, Artificial Sequence
  Description of Artificial Sequence: Synthetic oligonucleotide
aaaaggtcctactgagcagc

SEQ ID NO: 1598 - DNA, 20 bp, Artificial Sequence
  Description of Artificial Sequence: Synthetic oligonucleotide
aaaggtcctactgagcagct

SEQ ID NO: 1599 - DNA, 20 bp, Artificial Sequence
  Description of Artificial Sequence: Synthetic oligonucleotide
aaggtcctactgagcagctt

SEQ ID NO: 1600 - DNA, 20 bp, Artificial Sequence
  Description of Artificial Sequence: Synthetic oligonucleotide
aggtcctactgagcagcttg

SEQ ID NO: 1601 - DNA, 20 bp, Artificial Sequence
  Description of Artificial Sequence: Synthetic oligonucleotide
ggtcctactgagcagcttgt

SEQ ID NO: 1602 - DNA, 20 bp, Artificial Sequence
  Description of Artificial Sequence: Synthetic oligonucleotide
gtcctactgagcagcttgtc

SEQ ID NO: 1603 - DNA, 20 bp, Artificial Sequence
  Description of Artificial Sequence: Synthetic oligonucleotide
tcctactgagcagcttgtct

SEQ ID NO: 1604 - DNA, 20 bp, Artificial Sequence
  Description of Artificial Sequence: Synthetic oligonucleotide
cctactgagcagcttgtctc

SEQ ID NO: 1605 - DNA, 20 bp, Artificial Sequence
  Description of Artificial Sequence: Synthetic oligonucleotide
ctactgagcagcttgtctca

SEQ ID NO: 1606 - DNA, 20 bp, Artificial Sequence
  Description of Artificial Sequence: Synthetic oligonucleotide
tactgagcagcttgtctcac

SEQ ID NO: 1607 - DNA, 20 bp, Artificial Sequence
  Description of Artificial Sequence: Synthetic oligonucleotide
actgagcagcttgtctcacc

SEQ ID NO: 1608 - DNA, 20 bp, Artificial Sequence
  Description of Artificial Sequence: Synthetic oligonucleotide
ctgagcagcttgtctcacca

SEQ ID NO: 1609 - DNA, 20 bp, Artificial Sequence
  Description of Artificial Sequence: Synthetic oligonucleotide
tgagcagcttgtctcaccag

SEQ ID NO: 1610 - DNA, 20 bp, Artificial Sequence
  Description of Artificial Sequence: Synthetic oligonucleotide
gagcagcttgtctcaccaga

SEQ ID NO: 1611 - DNA, 20 bp, Artificial Sequence
  Description of Artificial Sequence: Synthetic oligonucleotide
agcagcttgtctcaccagag

SEQ ID NO: 1612 - DNA, 20 bp, Artificial Sequence
  Description of Artificial Sequence: Synthetic oligonucleotide
gcagcttgtctcaccagagc

SEQ ID NO: 1613 - DNA, 20 bp, Artificial Sequence
  Description of Artificial Sequence: Synthetic oligonucleotide
cagcttgtctcaccagagcc

SEQ ID NO: 1614 - DNA, 20 bp, Artificial Sequence
  Description of Artificial Sequence: Synthetic oligonucleotide
agcttgtctcaccagagcct

SEQ ID NO: 1615 - DNA, 20 bp, Artificial Sequence
  Description of Artificial Sequence: Synthetic oligonucleotide
gcttgtctcaccagagcctg

SEQ ID NO: 1616 - DNA, 20 bp, Artificial Sequence
  Description of Artificial Sequence: Synthetic oligonucleotide
cttgtctcaccagagcctga

SEQ ID NO: 1617 - DNA, 20 bp, Artificial Sequence
  Description of Artificial Sequence: Synthetic oligonucleotide
ttgtctcaccagagcctgaa

SEQ ID NO: 1618 - DNA, 20 bp, Artificial Sequence
  Description of Artificial Sequence: Synthetic oligonucleotide
tgtctcaccagagcctgaag

SEQ ID NO: 1619 - DNA, 20 bp, Artificial Sequence
  Description of Artificial Sequence: Synthetic oligonucleotide
gtctcaccagagcctgaagt

SEQ ID NO: 1620 - DNA, 20 bp, Artificial Sequence
  Description of Artificial Sequence: Synthetic oligonucleotide
tctcaccagagcctgaagtc

SEQ ID NO: 1621 - DNA, 20 bp, Artificial Sequence
  Description of Artificial Sequence: Synthetic oligonucleotide
ctcaccagagcctgaagtcc

SEQ ID NO: 1622 - DNA, 20 bp, Artificial Sequence
  Description of Artificial Sequence: Synthetic oligonucleotide
tcaccagagcctgaagtcca

SEQ ID NO: 1623 - DNA, 20 bp, Artificial Sequence
  Description of Artificial Sequence: Synthetic oligonucleotide
caccagagcctgaagtccat

SEQ ID NO: 1624 - DNA, 20 bp, Artificial Sequence
  Description of Artificial Sequence: Synthetic oligonucleotide
accagagcctgaagtccatg

SEQ ID NO: 1625 - DNA, 20 bp, Artificial Sequence
  Description of Artificial Sequence: Synthetic oligonucleotide
ccagagcctgaagtccatga

SEQ ID NO: 1626 - DNA, 20 bp, Artificial Sequence
  Description of Artificial Sequence: Synthetic oligonucleotide
cagagcctgaagtccatgat

SEQ ID NO: 1627 - DNA, 20 bp, Artificial Sequence
  Description of Artificial Sequence: Synthetic oligonucleotide
agagcctgaagtccatgata

SEQ ID NO: 1628 - DNA, 20 bp, Artificial Sequence
  Description of Artificial Sequence: Synthetic oligonucleotide
gagcctgaagtccatgatat

SEQ ID NO: 1629 - DNA, 20 bp, Artificial Sequence
  Description of Artificial Sequence: Synthetic oligonucleotide
agcctgaagtccatgatatt

SEQ ID NO: 1630 - DNA, 20 bp, Artificial Sequence
  Description of Artificial Sequence: Synthetic oligonucleotide
gcctgaagtccatgatattg

SEQ ID NO: 1631 - DNA, 20 bp, Artificial Sequence
  Description of Artificial Sequence: Synthetic oligonucleotide
cctgaagtccatgatattga

SEQ ID NO: 1632 - DNA, 20 bp, Artificial Sequence
  Description of Artificial Sequence: Synthetic oligonucleotide
ctgaagtccatgatattgaa

SEQ ID NO: 1633 - DNA, 20 bp, Artificial Sequence
  Description of Artificial Sequence: Synthetic oligonucleotide
tgaagtccatgatattgaaa

SEQ ID NO: 1634 - DNA, 20 bp, Artificial Sequence
  Description of Artificial Sequence: Synthetic oligonucleotide
gaagtccatgatattgaaag

SEQ ID NO: 1635 - DNA, 20 bp, Artificial Sequence
  Description of Artificial Sequence: Synthetic oligonucleotide
aagtccatgatattgaaaga

SEQ ID NO: 1636 - DNA, 20 bp, Artificial Sequence
  Description of Artificial Sequence: Synthetic oligonucleotide
agtccatgatattgaaagat

SEQ ID NO: 1637 - DNA, 20 bp, Artificial Sequence
  Description of Artificial Sequence: Synthetic oligonucleotide
gtccatgatattgaaagatc

SEQ ID NO: 1638 - DNA, 20 bp, Artificial Sequence
  Description of Artificial Sequence: Synthetic oligonucleotide
tccatgatattgaaagatct

SEQ ID NO: 1639 - DNA, 20 bp, Artificial Sequence
  Description of Artificial Sequence: Synthetic oligonucleotide
ccatgatattgaaagatctg

SEQ ID NO: 1640 - DNA, 20 bp, Artificial Sequence
  Description of Artificial Sequence: Synthetic oligonucleotide
catgatattgaaagatctga

SEQ ID NO: 1641 - DNA, 20 bp, Artificial Sequence
  Description of Artificial Sequence: Synthetic oligonucleotide
atgatattgaaagatctgaa

SEQ ID NO: 1642 - DNA, 20 bp, Artificial Sequence
  Description of Artificial Sequence: Synthetic oligonucleotide
tgatattgaaagatctgaag

SEQ ID NO: 1643 - DNA, 20 bp, Artificial Sequence
  Description of Artificial Sequence: Synthetic oligonucleotide
gatattgaaagatctgaaga

SEQ ID NO: 1644 - DNA, 20 bp, Artificial Sequence
  Description of Artificial Sequence: Synthetic oligonucleotide
atattgaaagatctgaagaa

SEQ ID NO: 1645 - DNA, 20 bp, Artificial Sequence
  Description of Artificial Sequence: Synthetic oligonucleotide
tattgaaagatctgaagaag

SEQ ID NO: 1646 - DNA, 20 bp, Artificial Sequence
  Description of Artificial Sequence: Synthetic oligonucleotide
attgaaagatctgaagaaga

SEQ ID NO: 1647 - DNA, 20 bp, Artificial Sequence
  Description of Artificial Sequence: Synthetic oligonucleotide
ttgaaagatctgaagaagat

SEQ ID NO: 1648 - DNA, 20 bp, Artificial Sequence
  Description of Artificial Sequence: Synthetic oligonucleotide
tgaaagatctgaagaagatg

SEQ ID NO: 1649 - DNA, 20 bp, Artificial Sequence
  Description of Artificial Sequence: Synthetic oligonucleotide
gaaagatctgaagaagatga

SEQ ID NO: 1650 - DNA, 20 bp, Artificial Sequence
  Description of Artificial Sequence: Synthetic oligonucleotide
aaagatctgaagaagatgat

SEQ ID NO: 1651 - DNA, 20 bp, Artificial Sequence
  Description of Artificial Sequence: Synthetic oligonucleotide
aagatctgaagaagatgatc

SEQ ID NO: 1652 - DNA, 20 bp, Artificial Sequence
  Description of Artificial Sequence: Synthetic oligonucleotide
agatctgaagaagatgatca

SEQ ID NO: 1653 - DNA, 20 bp, Artificial Sequence
  Description of Artificial Sequence: Synthetic oligonucleotide
gatctgaagaagatgatcag

SEQ ID NO: 1654 - DNA, 20 bp, Artificial Sequence
  Description of Artificial Sequence: Synthetic oligonucleotide
atctgaagaagatgatcagt

SEQ ID NO: 1655 - DNA, 20 bp, Artificial Sequence
  Description of Artificial Sequence: Synthetic oligonucleotide
tctgaagaagatgatcagtt

SEQ ID NO: 1656 - DNA, 20 bp, Artificial Sequence
  Description of Artificial Sequence: Synthetic oligonucleotide
ctgaagaagatgatcagttc

SEQ ID NO: 1657 - DNA, 20 bp, Artificial Sequence
  Description of Artificial Sequence: Synthetic oligonucleotide
tgaagaagatgatcagttca

SEQ ID NO: 1658 - DNA, 20 bp, Artificial Sequence
  Description of Artificial Sequence: Synthetic oligonucleotide
gaagaagatgatcagttcat

SEQ ID NO: 1659 - DNA, 20 bp, Artificial Sequence
  Description of Artificial Sequence: Synthetic oligonucleotide
aagaagatgatcagttcatt

SEQ ID NO: 1660 - DNA, 20 bp, Artificial Sequence
  Description of Artificial Sequence: Synthetic oligonucleotide
agaagatgatcagttcatta

SEQ ID NO: 1661 - DNA, 20 bp, Artificial Sequence
  Description of Artificial Sequence: Synthetic oligonucleotide
gaagatgatcagttcattat

SEQ ID NO: 1662 - DNA, 20 bp, Artificial Sequence
  Description of Artificial Sequence: Synthetic oligonucleotide
aagatgatcagttcattatc

SEQ ID NO: 1663 - DNA, 20 bp, Artificial Sequence
  Description of Artificial Sequence: Synthetic oligonucleotide
agatgatcagttcattatcc

SEQ ID NO: 1664 - DNA, 20 bp, Artificial Sequence
  Description of Artificial Sequence: Synthetic oligonucleotide
gatgatcagttcattatcct

SEQ ID NO: 1665 - DNA, 20 bp, Artificial Sequence
  Description of Artificial Sequence: Synthetic oligonucleotide
atgatcagttcattatcctt

SEQ ID NO: 1666 - DNA, 20 bp, Artificial Sequence
  Description of Artificial Sequence: Synthetic oligonucleotide
tgatcagttcattatccttg

SEQ ID NO: 1667 - DNA, 20 bp, Artificial Sequence
  Description of Artificial Sequence: Synthetic oligonucleotide
gatcagttcattatccttgc

SEQ ID NO: 1668 - DNA, 20 bp, Artificial Sequence
  Description of Artificial Sequence: Synthetic oligonucleotide
atcagttcattatccttgca

SEQ ID NO: 1669 - DNA, 20 bp, Artificial Sequence
  Description of Artificial Sequence: Synthetic oligonucleotide
tcagttcattatccttgcat

SEQ ID NO: 1670 - DNA, 20 bp, Artificial Sequence
  Description of Artificial Sequence: Synthetic oligonucleotide
cagttcattatccttgcatg

SEQ ID NO: 1671 - DNA, 20 bp, Artificial Sequence
  Description of Artificial Sequence: Synthetic oligonucleotide
agttcattatccttgcatgt

SEQ ID NO: 1672 - DNA, 20 bp, Artificial Sequence
  Description of Artificial Sequence: Synthetic oligonucleotide
gttcattatccttgcatgtg

SEQ ID NO: 1673 - DNA, 20 bp, Artificial Sequence
  Description of Artificial Sequence: Synthetic oligonucleotide
ttcattatccttgcatgtga

SEQ ID NO: 1674 - DNA, 20 bp, Artificial Sequence
  Description of Artificial Sequence: Synthetic oligonucleotide
tcattatccttgcatgtgat

SEQ ID NO: 1675 - DNA, 20 bp, Artificial Sequence
  Description of Artificial Sequence: Synthetic oligonucleotide
cattatccttgcatgtgatg

SEQ ID NO: 1676 - DNA, 20 bp, Artificial Sequence
  Description of Artificial Sequence: Synthetic oligonucleotide
attatccttgcatgtgatgg

SEQ ID NO: 1677 - DNA, 20 bp, Artificial Sequence
  Description of Artificial Sequence: Synthetic oligonucleotide
ttatccttgcatgtgatggt

SEQ ID NO: 1678 - DNA, 20 bp, Artificial Sequence
  Description of Artificial Sequence: Synthetic oligonucleotide
tatccttgcatgtgatggta

SEQ ID NO: 1679 - DNA, 20 bp, Artificial Sequence
  Description of Artificial Sequence: Synthetic oligonucleotide
atccttgcatgtgatggtat

SEQ ID NO: 1680 - DNA, 20 bp, Artificial Sequence
  Description of Artificial Sequence: Synthetic oligonucleotide
tccttgcatgtgatggtatc

SEQ ID NO: 1681 - DNA, 20 bp, Artificial Sequence
  Description of Artificial Sequence: Synthetic oligonucleotide
ccttgcatgtgatggtatct

SEQ ID NO: 1682 - DNA, 20 bp, Artificial Sequence
  Description of Artificial Sequence: Synthetic oligonucleotide
cttgcatgtgatggtatctg

SEQ ID NO: 1683 - DNA, 20 bp, Artificial Sequence
  Description of Artificial Sequence: Synthetic oligonucleotide
ttgcatgtgatggtatctgg

SEQ ID NO: 1684 - DNA, 20 bp, Artificial Sequence
  Description of Artificial Sequence: Synthetic oligonucleotide
tgcatgtgatggtatctggg

SEQ ID NO: 1685 - DNA, 20 bp, Artificial Sequence
  Description of Artificial Sequence: Synthetic oligonucleotide
gcatgtgatggtatctggga

SEQ ID NO: 1686 - DNA, 20 bp, Artificial Sequence
  Description of Artificial Sequence: Synthetic oligonucleotide
catgtgatggtatctgggat

SEQ ID NO: 1687 - DNA, 20 bp, Artificial Sequence
  Description of Artificial Sequence: Synthetic oligonucleotide
atgtgatggtatctgggatg

SEQ ID NO: 1688 - DNA, 20 bp, Artificial Sequence
  Description of Artificial Sequence: Synthetic oligonucleotide
tgtgatggtatctgggatgt

SEQ ID NO: 1689 - DNA, 20 bp, Artificial Sequence
  Description of Artificial Sequence: Synthetic oligonucleotide
gtgatggtatctgggatgtt

SEQ ID NO: 1690 - DNA, 20 bp, Artificial Sequence
  Description of Artificial Sequence: Synthetic oligonucleotide
tgatggtatctgggatgtta

SEQ ID NO: 1691 - DNA, 20 bp, Artificial Sequence
  Description of Artificial Sequence: Synthetic oligonucleotide
gatggtatctgggatgttat

SEQ ID NO: 1692 - DNA, 20 bp, Artificial Sequence
  Description of Artificial Sequence: Synthetic oligonucleotide
atggtatctgggatgttatg

SEQ ID NO: 1693 - DNA, 20 bp, Artificial Sequence
  Description of Artificial Sequence: Synthetic oligonucleotide
tggtatctgggatgttatgg

SEQ ID NO: 1694 - DNA, 20 bp, Artificial Sequence
  Description of Artificial Sequence: Synthetic oligonucleotide
ggtatctgggatgttatggg

SEQ ID NO: 1695 - DNA, 20 bp, Artificial Sequence
  Description of Artificial Sequence: Synthetic oligonucleotide
gtatctgggatgttatggga

SEQ ID NO: 1696 - DNA, 20 bp, Artificial Sequence
  Description of Artificial Sequence: Synthetic oligonucleotide
tatctgggatgttatgggaa

SEQ ID NO: 1697 - DNA, 20 bp, Artificial Sequence
  Description of Artificial Sequence: Synthetic oligonucleotide
atctgggatgttatgggaaa

SEQ ID NO: 1698 - DNA, 20 bp, Artificial Sequence
  Description of Artificial Sequence: Synthetic oligonucleotide
tctgggatgttatgggaaat

SEQ ID NO: 1699 - DNA, 20 bp, Artificial Sequence
  Description of Artificial Sequence: Synthetic oligonucleotide
ctgggatgttatgggaaatg

SEQ ID NO: 1700 - DNA, 20 bp, Artificial Sequence
  Description of Artificial Sequence: Synthetic oligonucleotide
tgggatgttatgggaaatga

SEQ ID NO: 1701 - DNA, 20 bp, Artificial Sequence
  Description of Artificial Sequence: Synthetic oligonucleotide
gggatgttatgggaaatgaa

SEQ ID NO: 1702 - DNA, 20 bp, Artificial Sequence
  Description of Artificial Sequence: Synthetic oligonucleotide
ggatgttatgggaaatgaag

SEQ ID NO: 1703 - DNA, 20 bp, Artificial Sequence
  Description of Artificial Sequence: Synthetic oligonucleotide
gatgttatgggaaatgaaga

SEQ ID NO: 1704 - DNA, 20 bp, Artificial Sequence
  Description of Artificial Sequence: Synthetic oligonucleotide
atgttatgggaaatgaagag

SEQ ID NO: 1705 - DNA, 20 bp, Artificial Sequence
  Description of Artificial Sequence: Synthetic oligonucleotide
tgttatgggaaatgaagagc

SEQ ID NO: 1706 - DNA, 20 bp, Artificial Sequence
  Description of Artificial Sequence: Synthetic oligonucleotide
gttatgggaaatgaagagct

SEQ ID NO: 1707 - DNA, 20 bp, Artificial Sequence
  Description of Artificial Sequence: Synthetic oligonucleotide
ttatgggaaatgaagagctc

SEQ ID NO: 1708 - DNA, 20 bp, Artificial Sequence
  Description of Artificial Sequence: Synthetic oligonucleotide
tatgggaaatgaagagctct

SEQ ID NO: 1709 - DNA, 20 bp, Artificial Sequence
  Description of Artificial Sequence: Synthetic oligonucleotide
atgggaaatgaagagctctg

SEQ ID NO: 1710 - DNA, 20 bp, Artificial Sequence
  Description of Artificial Sequence: Synthetic oligonucleotide
tgggaaatgaagagctctgt

SEQ ID NO: 1711 - DNA, 20 bp, Artificial Sequence
  Description of Artificial Sequence: Synthetic oligonucleotide
gggaaatgaagagctctgtg

SEQ ID NO: 1712 - DNA, 20 bp, Artificial Sequence
  Description of Artificial Sequence: Synthetic oligonucleotide
ggaaatgaagagctctgtga

SEQ ID NO: 1713 - DNA, 20 bp, Artificial Sequence
  Description of Artificial Sequence: Synthetic oligonucleotide
gaaatgaagagctctgtgat

SEQ ID NO: 1714 - DNA, 20 bp, Artificial Sequence
  Description of Artificial Sequence: Synthetic oligonucleotide
aaatgaagagctctgtgatt

SEQ ID NO: 1715 - DNA, 20 bp, Artificial Sequence
  Description of Artificial Sequence: Synthetic oligonucleotide
aatgaagagctctgtgattt

SEQ ID NO: 1716 - DNA, 20 bp, Artificial Sequence
  Description of Artificial Sequence: Synthetic oligonucleotide
atgaagagctctgtgatttt

SEQ ID NO: 1717 - DNA, 20 bp, Artificial Sequence
  Description of Artificial Sequence: Synthetic oligonucleotide
tgaagagctctgtgattttg

SEQ ID NO: 1718 - DNA, 20 bp, Artificial Sequence
  Description of Artificial Sequence: Synthetic oligonucleotide
gaagagctctgtgattttgt

SEQ ID NO: 1719 - DNA, 20 bp, Artificial Sequence
  Description of Artificial Sequence: Synthetic oligonucleotide
aagagctctgtgattttgta

SEQ ID NO: 1720 - DNA, 20 bp, Artificial Sequence
  Description of Artificial Sequence: Synthetic oligonucleotide
agagctctgtgattttgtaa

SEQ ID NO: 1721 - DNA, 20 bp, Artificial Sequence
  Description of Artificial Sequence: Synthetic oligonucleotide
gagctctgtgattttgtaag

SEQ ID NO: 1722 - DNA, 20 bp, Artificial Sequence
  Description of Artificial Sequence: Synthetic oligonucleotide
agctctgtgattttgtaaga

SEQ ID NO: 1723 - DNA, 20 bp, Artificial Sequence
  Description of Artificial Sequence: Synthetic oligonucleotide
gctctgtgattttgtaagat

SEQ ID NO: 1724 - DNA, 20 bp, Artificial Sequence
  Description of Artificial Sequence: Synthetic oligonucleotide
ctctgtgattttgtaagatc

SEQ ID NO: 1725 - DNA, 20 bp, Artificial Sequence
  Description of Artificial Sequence: Synthetic oligonucleotide
tctgtgattttgtaagatcc

SEQ ID NO: 1726 - DNA, 20 bp, Artificial Sequence
  Description of Artificial Sequence: Synthetic oligonucleotide
ctgtgattttgtaagatcca

SEQ ID NO: 1727 - DNA, 20 bp, Artificial Sequence
  Description of Artificial Sequence: Synthetic oligonucleotide
tgtgattttgtaagatccag

SEQ ID NO: 1728 - DNA, 20 bp, Artificial Sequence
  Description of Artificial Sequence: Synthetic oligonucleotide
gtgattttgtaagatccaga

SEQ ID NO: 1729 - DNA, 20 bp, Artificial Sequence
  Description of Artificial Sequence: Synthetic oligonucleotide
tgattttgtaagatccagac

SEQ ID NO: 1730 - DNA, 20 bp, Artificial Sequence
  Description of Artificial Sequence: Synthetic oligonucleotide
gattttgtaagatccagact

SEQ ID NO: 1731 - DNA, 20 bp, Artificial Sequence
  Description of Artificial Sequence: Synthetic oligonucleotide
attttgtaagatccagactt

SEQ ID NO: 1732 - DNA, 20 bp, Artificial Sequence
  Description of Artificial Sequence: Synthetic oligonucleotide
ttttgtaagatccagacttg

SEQ ID NO: 1733 - DNA, 20 bp, Artificial Sequence
  Description of Artificial Sequence: Synthetic oligonucleotide
tttgtaagatccagacttga

SEQ ID NO: 1734 - DNA, 20 bp, Artificial Sequence
  Description of Artificial Sequence: Synthetic oligonucleotide
ttgtaagatccagacttgaa

SEQ ID NO: 1735 - DNA, 20 bp, Artificial Sequence
  Description of Artificial Sequence: Synthetic oligonucleotide
tgtaagatccagacttgaag

SEQ ID NO: 1736 - DNA, 20 bp, Artificial Sequence
  Description of Artificial Sequence: Synthetic oligonucleotide
gtaagatccagacttgaagt

SEQ ID NO: 1737 - DNA, 20 bp, Artificial Sequence
  Description of Artificial Sequence: Synthetic oligonucleotide
taagatccagacttgaagtc

SEQ ID NO: 1738 - DNA, 20 bp, Artificial Sequence
  Description of Artificial Sequence: Synthetic oligonucleotide
aagatccagacttgaagtca

SEQ ID NO: 1739 - DNA, 20 bp, Artificial Sequence
  Description of Artificial Sequence: Synthetic oligonucleotide
agatccagacttgaagtcac

SEQ ID NO: 1740 - DNA, 20 bp, Artificial Sequence
  Description of Artificial Sequence: Synthetic oligonucleotide
gatccagacttgaagtcact

SEQ ID NO: 1741 - DNA, 20 bp, Artificial Sequence
  Description of Artificial Sequence: Synthetic oligonucleotide
atccagacttgaagtcactg

SEQ ID NO: 1742 - DNA, 20 bp, Artificial Sequence
  Description of Artificial Sequence: Synthetic oligonucleotide
tccagacttgaagtcactga

SEQ ID NO: 1743 - DNA, 20 bp, Artificial Sequence
  Description of Artificial Sequence: Synthetic oligonucleotide
ccagacttgaagtcactgat

SEQ ID NO: 1744 - DNA, 20 bp, Artificial Sequence
  Description of Artificial Sequence: Synthetic oligonucleotide
cagacttgaagtcactgatg

SEQ ID NO: 1745 - DNA, 20 bp, Artificial Sequence
  Description of Artificial Sequence: Synthetic oligonucleotide
agacttgaagtcactgatga

SEQ ID NO: 1746 - DNA, 20 bp, Artificial Sequence
  Description of Artificial Sequence: Synthetic oligonucleotide
gacttgaagtcactgatgac

SEQ ID NO: 1747 - DNA, 20 bp, Artificial Sequence
  Description of Artificial Sequence: Synthetic oligonucleotide
acttgaagtcactgatgacc

SEQ ID NO: 1748 - DNA, 20 bp, Artificial Sequence
  Description of Artificial Sequence: Synthetic oligonucleotide
cttgaagtcactgatgacct

SEQ ID NO: 1749 - DNA, 20 bp, Artificial Sequence
  Description of Artificial Sequence: Synthetic oligonucleotide
ttgaagtcactgatgacctt

SEQ ID NO: 1750 - DNA, 20 bp, Artificial Sequence
  Description of Artificial Sequence: Synthetic oligonucleotide
tgaagtcactgatgaccttg

SEQ ID NO: 1751 - DNA, 20 bp, Artificial Sequence
  Description of Artificial Sequence: Synthetic oligonucleotide
gaagtcactgatgaccttga

SEQ ID NO: 1752 - DNA, 20 bp, Artificial Sequence
  Description of Artificial Sequence: Synthetic oligonucleotide
aagtcactgatgaccttgag

SEQ ID NO: 1753 - DNA, 20 bp, Artificial Sequence
  Description of Artificial Sequence: Synthetic oligonucleotide
agtcactgatgaccttgaga

SEQ ID NO: 1754 - DNA, 20 bp, Artificial Sequence
  Description of Artificial Sequence: Synthetic oligonucleotide
gtcactgatgaccttgagaa

SEQ ID NO: 1755 - DNA, 20 bp, Artificial Sequence
  Description of Artificial Sequence: Synthetic oligonucleotide
tcactgatgaccttgagaaa

SEQ ID NO: 1756 - DNA, 20 bp, Artificial Sequence
  Description of Artificial Sequence: Synthetic oligonucleotide
cactgatgaccttgagaaag

SEQ ID NO: 1757 - DNA, 20 bp, Artificial Sequence
  Description of Artificial Sequence: Synthetic oligonucleotide
actgatgaccttgagaaagt

SEQ ID NO: 1758 - DNA, 20 bp, Artificial Sequence
  Description of Artificial Sequence: Synthetic oligonucleotide
ctgatgaccttgagaaagtt

SEQ ID NO: 1759 - DNA, 20 bp, Artificial Sequence
  Description of Artificial Sequence: Synthetic oligonucleotide
tgatgaccttgagaaagttt

SEQ ID NO: 1760 - DNA, 20 bp, Artificial Sequence
  Description of Artificial Sequence: Synthetic oligonucleotide
gatgaccttgagaaagtttg

SEQ ID NO: 1761 - DNA, 20 bp, Artificial Sequence
  Description of Artificial Sequence: Synthetic oligonucleotide
atgaccttgagaaagtttgc

SEQ ID NO: 1762 - DNA, 20 bp, Artificial Sequence
  Description of Artificial Sequence: Synthetic oligonucleotide
tgaccttgagaaagtttgca

SEQ ID NO: 1763 - DNA, 20 bp, Artificial Sequence
  Description of Artificial Sequence: Synthetic oligonucleotide
gaccttgagaaagtttgcaa

SEQ ID NO: 1764 - DNA, 20 bp, Artificial Sequence
  Description of Artificial Sequence: Synthetic oligonucleotide
accttgagaaagtttgcaat

SEQ ID NO: 1765 - DNA, 20 bp, Artificial Sequence
  Description of Artificial Sequence: Synthetic oligonucleotide
ccttgagaaagtttgcaatg

SEQ ID NO: 1766 - DNA, 20 bp, Artificial Sequence
  Description of Artificial Sequence: Synthetic oligonucleotide
cttgagaaagtttgcaatga

SEQ ID NO: 1767 - DNA, 20 bp, Artificial Sequence
  Description of Artificial Sequence: Synthetic oligonucleotide
ttgagaaagtttgcaatgaa

SEQ ID NO: 1768 - DNA, 20 bp, Artificial Sequence
  Description of Artificial Sequence: Synthetic oligonucleotide
tgagaaagtttgcaatgaag

SEQ ID NO: 1769 - DNA, 20 bp, Artificial Sequence
  Description of Artificial Sequence: Synthetic oligonucleotide
gagaaagtttgcaatgaagt

SEQ ID NO: 1770 - DNA, 20 bp, Artificial Sequence
  Description of Artificial Sequence: Synthetic oligonucleotide
agaaagtttgcaatgaagta

SEQ ID NO: 1771 - DNA, 20 bp, Artificial Sequence
  Description of Artificial Sequence: Synthetic oligonucleotide
gaaagtttgcaatgaagtag

SEQ ID NO: 1772 - DNA, 20 bp, Artificial Sequence
  Description of Artificial Sequence: Synthetic oligonucleotide
aaagtttgcaatgaagtagt

SEQ ID NO: 1773 - DNA, 20 bp, Artificial Sequence
  Description of Artificial Sequence: Synthetic oligonucleotide
aagtttgcaatgaagtagtc

SEQ ID NO: 1774 - DNA, 20 bp, Artificial Sequence
  Description of Artificial Sequence: Synthetic oligonucleotide
agtttgcaatgaagtagtcg

SEQ ID NO: 1775 - DNA, 20 bp, Artificial Sequence
  Description of Artificial Sequence: Synthetic oligonucleotide
gtttgcaatgaagtagtcga

SEQ ID NO: 1776 - DNA, 20 bp, Artificial Sequence
  Description of Artificial Sequence: Synthetic oligonucleotide
tttgcaatgaagtagtcgac

SEQ ID NO: 1777 - DNA, 20 bp, Artificial Sequence
  Description of Artificial Sequence: Synthetic oligonucleotide
ttgcaatgaagtagtcgaca

SEQ ID NO: 1778 - DNA, 20 bp, Artificial Sequence
  Description of Artificial Sequence: Synthetic oligonucleotide
tgcaatgaagtagtcgacac

SEQ ID NO: 1779 - DNA, 20 bp, Artificial Sequence
  Description of Artificial Sequence: Synthetic oligonucleotide
gcaatgaagtagtcgacacc

SEQ ID NO: 1780 - DNA, 20 bp, Artificial Sequence
  Description of Artificial Sequence: Synthetic oligonucleotide
caatgaagtagtcgacacct

SEQ ID NO: 1781 - DNA, 20 bp, Artificial Sequence
  Description of Artificial Sequence: Synthetic oligonucleotide
aatgaagtagtcgacacctg

SEQ ID NO: 1782 - DNA, 20 bp, Artificial Sequence
  Description of Artificial Sequence: Synthetic oligonucleotide
atgaagtagtcgacacctgt

SEQ ID NO: 1783 - DNA, 20 bp, Artificial Sequence
  Description of Artificial Sequence: Synthetic oligonucleotide
tgaagtagtcgacacctgtt

SEQ ID NO: 1784 - DNA, 20 bp, Artificial Sequence
  Description of Artificial Sequence: Synthetic oligonucleotide
gaagtagtcgacacctgttt

SEQ ID NO: 1785 - DNA, 20 bp, Artificial Sequence
  Description of Artificial Sequence: Synthetic oligonucleotide
aagtagtcgacacctgtttg

SEQ ID NO: 1786 - DNA, 20 bp, Artificial Sequence
  Description of Artificial Sequence: Synthetic oligonucleotide
agtagtcgacacctgtttgt

SEQ ID NO: 1787 - DNA, 20 bp, Artificial Sequence
  Description of Artificial Sequence: Synthetic oligonucleotide
gtagtcgacacctgtttgta

SEQ ID NO: 1788 - DNA, 20 bp, Artificial Sequence
  Description of Artificial Sequence: Synthetic oligonucleotide
tagtcgacacctgtttgtat

SEQ ID NO: 1789 - DNA, 20 bp, Artificial Sequence
  Description of Artificial Sequence: Synthetic oligonucleotide
agtcgacacctgtttgtata

SEQ ID NO: 1790 - DNA, 20 bp, Artificial Sequence
  Description of Artificial Sequence: Synthetic oligonucleotide
gtcgacacctgtttgtataa

SEQ ID NO: 1791 - DNA, 20 bp, Artificial Sequence
  Description of Artificial Sequence: Synthetic oligonucleotide
tcgacacctgtttgtataag

SEQ ID NO: 1792 - DNA, 20 bp, Artificial Sequence
  Description of Artificial Sequence: Synthetic oligonucleotide
cgacacctgtttgtataagg

SEQ ID NO: 1793 - DNA, 20 bp, Artificial Sequence
  Description of Artificial Sequence: Synthetic oligonucleotide
gacacctgtttgtataaggg

SEQ ID NO: 1794 - DNA, 20 bp, Artificial Sequence
  Description of Artificial Sequence: Synthetic oligonucleotide
acacctgtttgtataaggga

SEQ ID NO: 1795 - DNA, 20 bp, Artificial Sequence
  Description of Artificial Sequence: Synthetic oligonucleotide
cacctgtttgtataagggaa

SEQ ID NO: 1796 - DNA, 20 bp, Artificial Sequence
  Description of Artificial Sequence: Synthetic oligonucleotide
acctgtttgtataagggaag

SEQ ID NO: 1797 - DNA, 20 bp, Artificial Sequence
  Description of Artificial Sequence: Synthetic oligonucleotide
cctgtttgtataagggaagt

SEQ ID NO: 1798 - DNA, 20 bp, Artificial Sequence
  Description of Artificial Sequence: Synthetic oligonucleotide
ctgtttgtataagggaagtc

SEQ ID NO: 1799 - DNA, 20 bp, Artificial Sequence
  Description of Artificial Sequence: Synthetic oligonucleotide
tgtttgtataagggaagtcg

SEQ ID NO: 1800 - DNA, 20 bp, Artificial Sequence
  Description of Artificial Sequence: Synthetic oligonucleotide
gtttgtataagggaagtcga

SEQ ID NO: 1801 - DNA, 20 bp, Artificial Sequence
  Description of Artificial Sequence: Synthetic oligonucleotide
tttgtataagggaagtcgag

SEQ ID NO: 1802 - DNA, 20 bp, Artificial Sequence
  Description of Artificial Sequence: Synthetic oligonucleotide
ttgtataagggaagtcgaga

SEQ ID NO: 1803 - DNA, 20 bp, Artificial Sequence
  Description of Artificial Sequence: Synthetic oligonucleotide
tgtataagggaagtcgagac

SEQ ID NO: 1804 - DNA, 20 bp, Artificial Sequence
  Description of Artificial Sequence: Synthetic oligonucleotide
gtataagggaagtcgagaca

SEQ ID NO: 1805 - DNA, 20 bp, Artificial Sequence
  Description of Artificial Sequence: Synthetic oligonucleotide
tataagggaagtcgagacaa

SEQ ID NO: 1806 - DNA, 20 bp, Artificial Sequence
  Description of Artificial Sequence: Synthetic oligonucleotide
ataagggaagtcgagacaac

SEQ ID NO: 1807 - DNA, 20 bp, Artificial Sequence
  Description of Artificial Sequence: Synthetic oligonucleotide
taagggaagtcgagacaaca

SEQ ID NO: 1808 - DNA, 20 bp, Artificial Sequence
  Description of Artificial Sequence: Synthetic oligonucleotide
aagggaagtcgagacaacat

SEQ ID NO: 1809 - DNA, 20 bp, Artificial Sequence
  Description of Artificial Sequence: Synthetic oligonucleotide
agggaagtcgagacaacatg

SEQ ID NO: 1810 - DNA, 20 bp, Artificial Sequence
  Description of Artificial Sequence: Synthetic oligonucleotide
gggaagtcgagacaacatga

SEQ ID NO: 1811 - DNA, 20 bp, Artificial Sequence
  Description of Artificial Sequence: Synthetic oligonucleotide
ggaagtcgagacaacatgag

SEQ ID NO: 1812 - DNA, 20 bp, Artificial Sequence
  Description of Artificial Sequence: Synthetic oligonucleotide
gaagtcgagacaacatgagt

SEQ ID NO: 1813 - DNA, 20 bp, Artificial Sequence
  Description of Artificial Sequence: Synthetic oligonucleotide
aagtcgagacaacatgagtg

SEQ ID NO: 1814 - DNA, 20 bp, Artificial Sequence
  Description of Artificial Sequence: Synthetic oligonucleotide
agtcgagacaacatgagtgt

SEQ ID NO: 1815 - DNA, 20 bp, Artificial Sequence
  Description of Artificial Sequence: Synthetic oligonucleotide
gtcgagacaacatgagtgtg

SEQ ID NO: 1816 - DNA, 20 bp, Artificial Sequence
  Description of Artificial Sequence: Synthetic oligonucleotide
tcgagacaacatgagtgtga

SEQ ID NO: 1817 - DNA, 20 bp, Artificial Sequence
  Description of Artificial Sequence: Synthetic oligonucleotide
cgagacaacatgagtgtgat

SEQ ID NO: 1818 - DNA, 20 bp, Artificial Sequence
  Description of Artificial Sequence: Synthetic oligonucleotide
gagacaacatgagtgtgatt

SEQ ID NO: 1819 - DNA, 20 bp, Artificial Sequence
  Description of Artificial Sequence: Synthetic oligonucleotide
agacaacatgagtgtgattt

SEQ ID NO: 1820 - DNA, 20 bp, Artificial Sequence
  Description of Artificial Sequence: Synthetic oligonucleotide
gacaacatgagtgtgatttt

SEQ ID NO: 1821 - DNA, 20 bp, Artificial Sequence
  Description of Artificial Sequence: Synthetic oligonucleotide
acaacatgagtgtgattttg

SEQ ID NO: 1822 - DNA, 20 bp, Artificial Sequence
  Description of Artificial Sequence: Synthetic oligonucleotide
caacatgagtgtgattttga

SEQ ID NO: 1823 - DNA, 20 bp, Artificial Sequence
  Description of Artificial Sequence: Synthetic oligonucleotide
aacatgagtgtgattttgat

SEQ ID NO: 1824 - DNA, 20 bp, Artificial Sequence
  Description of Artificial Sequence: Synthetic oligonucleotide
acatgagtgtgattttgatc

SEQ ID NO: 1825 - DNA, 20 bp, Artificial Sequence
  Description of Artificial Sequence: Synthetic oligonucleotide
catgagtgtgattttgatct

SEQ ID NO: 1826 - DNA, 20 bp, Artificial Sequence
  Description of Artificial Sequence: Synthetic oligonucleotide
atgagtgtgattttgatctg

SEQ ID NO: 1827 - DNA, 20 bp, Artificial Sequence
  Description of Artificial Sequence: Synthetic oligonucleotide
tgagtgtgattttgatctgt

SEQ ID NO: 1828 - DNA, 20 bp, Artificial Sequence
  Description of Artificial Sequence: Synthetic oligonucleotide
gagtgtgattttgatctgtt

SEQ ID NO: 1829 - DNA, 20 bp, Artificial Sequence
  Description of Artificial Sequence: Synthetic oligonucleotide
agtgtgattttgatctgttt

SEQ ID NO: 1830 - DNA, 20 bp, Artificial Sequence
  Description of Artificial Sequence: Synthetic oligonucleotide
gtgtgattttgatctgtttt

SEQ ID NO: 1831 - DNA, 20 bp, Artificial Sequence
  Description of Artificial Sequence: Synthetic oligonucleotide
tgtgattttgatctgttttc

SEQ ID NO: 1832 - DNA, 20 bp, Artificial Sequence
  Description of Artificial Sequence: Synthetic oligonucleotide
gtgattttgatctgttttcc

SEQ ID NO: 1833 - DNA, 20 bp, Artificial Sequence
  Description of Artificial Sequence: Synthetic oligonucleotide
tgattttgatctgttttcca

SEQ ID NO: 1834 - DNA, 20 bp, Artificial Sequence
  Description of Artificial Sequence: Synthetic oligonucleotide
gattttgatctgttttccaa

SEQ ID NO: 1835 - DNA, 20 bp, Artificial Sequence
  Description of Artificial Sequence: Synthetic oligonucleotide
attttgatctgttttccaaa

SEQ ID NO: 1836 - DNA, 20 bp, Artificial Sequence
  Description of Artificial Sequence: Synthetic oligonucleotide
ttttgatctgttttccaaat

SEQ ID NO: 1837 - DNA, 20 bp, Artificial Sequence
  Description of Artificial Sequence: Synthetic oligonucleotide
tttgatctgttttccaaatg

SEQ ID NO: 1838 - DNA, 20 bp, Artificial Sequence
  Description of Artificial Sequence: Synthetic oligonucleotide
ttgatctgttttccaaatgc

SEQ ID NO: 1839 - DNA, 20 bp, Artificial Sequence
  Description of Artificial Sequence: Synthetic oligonucleotide
tgatctgttttccaaatgca

SEQ ID NO: 1840 - DNA, 20 bp, Artificial Sequence
  Description of Artificial Sequence: Synthetic oligonucleotide
gatctgttttccaaatgcac

SEQ ID NO: 1841 - DNA, 20 bp, Artificial Sequence
  Description of Artificial Sequence: Synthetic oligonucleotide
atctgttttccaaatgcacc

SEQ ID NO: 1842 - DNA, 20 bp, Artificial Sequence
  Description of Artificial Sequence: Synthetic oligonucleotide
tctgttttccaaatgcaccc

SEQ ID NO: 1843 - DNA, 20 bp, Artificial Sequence
  Description of Artificial Sequence: Synthetic oligonucleotide
ctgttttccaaatgcaccca

SEQ ID NO: 1844 - DNA, 20 bp, Artificial Sequence
  Description of Artificial Sequence: Synthetic oligonucleotide
tgttttccaaatgcacccaa

SEQ ID NO: 1845 - DNA, 20 bp, Artificial Sequence
  Description of Artificial Sequence: Synthetic oligonucleotide
gttttccaaatgcacccaaa

SEQ ID NO: 1846 - DNA, 20 bp, Artificial Sequence
  Description of Artificial Sequence: Synthetic oligonucleotide
ttttccaaatgcacccaaag

SEQ ID NO: 1847 - DNA, 20 bp, Artificial Sequence
  Description of Artificial Sequence: Synthetic oligonucleotide
tttccaaatgcacccaaagt

SEQ ID NO: 1848 - DNA, 20 bp, Artificial Sequence
  Description of Artificial Sequence: Synthetic oligonucleotide
ttccaaatgcacccaaagta

SEQ ID NO: 1849 - DNA, 20 bp, Artificial Sequence
  Description of Artificial Sequence: Synthetic oligonucleotide
tccaaatgcacccaaagtat

SEQ ID NO: 1850 - DNA, 20 bp, Artificial Sequence
  Description of Artificial Sequence: Synthetic oligonucleotide
ccaaatgcacccaaagtatc

SEQ ID NO: 1851 - DNA, 20 bp, Artificial Sequence
  Description of Artificial Sequence: Synthetic oligonucleotide
caaatgcacccaaagtatcg

SEQ ID NO: 1852 - DNA, 20 bp, Artificial Sequence
  Description of Artificial Sequence: Synthetic oligonucleotide
aaatgcacccaaagtatcgc

SEQ ID NO: 1853 - DNA, 20 bp, Artificial Sequence
  Description of Artificial Sequence: Synthetic oligonucleotide
aatgcacccaaagtatcgcc

SEQ ID NO: 1854 - DNA, 20 bp, Artificial Sequence
  Description of Artificial Sequence: Synthetic oligonucleotide
atgcacccaaagtatcgcca

SEQ ID NO: 1855 - DNA, 20 bp, Artificial Sequence
  Description of Artificial Sequence: Synthetic oligonucleotide
tgcacccaaagtatcgccag

SEQ ID NO: 1856 - DNA, 20 bp, Artificial Sequence
  Description of Artificial Sequence: Synthetic oligonucleotide
gcacccaaagtatcgccaga

SEQ ID NO: 1857 - DNA, 20 bp, Artificial Sequence
  Description of Artificial Sequence: Synthetic oligonucleotide
cacccaaagtatcgccagaa

SEQ ID NO: 1858 - DNA, 20 bp, Artificial Sequence
  Description of Artificial Sequence: Synthetic oligonucleotide
acccaaagtatcgccagaag

SEQ ID NO: 1859 - DNA, 20 bp, Artificial Sequence
  Description of Artificial Sequence: Synthetic oligonucleotide
cccaaagtatcgccagaagc

SEQ ID NO: 1860 - DNA, 20 bp, Artificial Sequence
  Description of Artificial Sequence: Synthetic oligonucleotide
ccaaagtatcgccagaagca

SEQ ID NO: 1861 - DNA, 20 bp, Artificial Sequence
  Description of Artificial Sequence: Synthetic oligonucleotide
caaagtatcgccagaagcag

SEQ ID NO: 1862 - DNA, 20 bp, Artificial Sequence
  Description of Artificial Sequence: Synthetic oligonucleotide
aaagtatcgccagaagcagt

SEQ ID NO: 1863 - DNA, 20 bp, Artificial Sequence
  Description of Artificial Sequence: Synthetic oligonucleotide
aagtatcgccagaagcagtg

SEQ ID NO: 1864 - DNA, 20 bp, Artificial Sequence
  Description of Artificial Sequence: Synthetic oligonucleotide
agtatcgccagaagcagtga

SEQ ID NO: 1865 - DNA, 20 bp, Artificial Sequence
  Description of Artificial Sequence: Synthetic oligonucleotide
gtatcgccagaagcagtgaa

SEQ ID NO: 1866 - DNA, 20 bp, Artificial Sequence
  Description of Artificial Sequence: Synthetic oligonucleotide
tatcgccagaagcagtgaag

SEQ ID NO: 1867 - DNA, 20 bp, Artificial Sequence
  Description of Artificial Sequence: Synthetic oligonucleotide
atcgccagaagcagtgaaga

SEQ ID NO: 1868 - DNA, 20 bp, Artificial Sequence
  Description of Artificial Sequence: Synthetic oligonucleotide
tcgccagaagcagtgaagaa

SEQ ID NO: 1869 - DNA, 20 bp, Artificial Sequence
  Description of Artificial Sequence: Synthetic oligonucleotide
cgccagaagcagtgaagaag

SEQ ID NO: 1870 - DNA, 20 bp, Artificial Sequence
  Description of Artificial Sequence: Synthetic oligonucleotide
gccagaagcagtgaagaagg

SEQ ID NO: 1871 - DNA, 20 bp, Artificial Sequence
  Description of Artificial Sequence: Synthetic oligonucleotide
ccagaagcagtgaagaagga

SEQ ID NO: 1872 - DNA, 20 bp, Artificial Sequence
  Description of Artificial Sequence: Synthetic oligonucleotide
cagaagcagtgaagaaggag

SEQ ID NO: 1873 - DNA, 20 bp, Artificial Sequence
  Description of Artificial Sequence: Synthetic oligonucleotide
agaagcagtgaagaaggagg

SEQ ID NO: 1874 - DNA, 20 bp, Artificial Sequence
  Description of Artificial Sequence: Synthetic oligonucleotide
gaagcagtgaagaaggaggc

SEQ ID NO: 1875 - DNA, 20 bp, Artificial Sequence
  Description of Artificial Sequence: Synthetic oligonucleotide
aagcagtgaagaaggaggca

SEQ ID NO: 1876 - DNA, 20 bp, Artificial Sequence
  Description of Artificial Sequence: Synthetic oligonucleotide
agcagtgaagaaggaggcag

SEQ ID NO: 1877 - DNA, 20 bp, Artificial Sequence
  Description of Artificial Sequence: Synthetic oligonucleotide
gcagtgaagaaggaggcaga

SEQ ID NO: 1878 - DNA, 20 bp, Artificial Sequence
  Description of Artificial Sequence: Synthetic oligonucleotide
cagtgaagaaggaggcagag

SEQ ID NO: 1879 - DNA, 20 bp, Artificial Sequence
  Description of Artificial Sequence: Synthetic oligonucleotide
agtgaagaaggaggcagagt

SEQ ID NO: 1880 - DNA, 20 bp, Artificial Sequence
  Description of Artificial Sequence: Synthetic oligonucleotide
gtgaagaaggaggcagagtt

SEQ ID NO: 1881 - DNA, 20 bp, Artificial Sequence
  Description of Artificial Sequence: Synthetic oligonucleotide
tgaagaaggaggcagagttg

SEQ ID NO: 1882 - DNA, 20 bp, Artificial Sequence
  Description of Artificial Sequence: Synthetic oligonucleotide
gaagaaggaggcagagttgg

SEQ ID NO: 1883 - DNA, 20 bp, Artificial Sequence
  Description of Artificial Sequence: Synthetic oligonucleotide
aagaaggaggcagagttgga

SEQ ID NO: 1884 - DNA, 20 bp, Artificial Sequence
  Description of Artificial Sequence: Synthetic oligonucleotide
agaaggaggcagagttggac

SEQ ID NO: 1885 - DNA, 20 bp, Artificial Sequence
  Description of Artificial Sequence: Synthetic oligonucleotide
gaaggaggcagagttggaca

SEQ ID NO: 1886 - DNA, 20 bp, Artificial Sequence
  Description of Artificial Sequence: Synthetic oligonucleotide
aaggaggcagagttggacaa

SEQ ID NO: 1887 - DNA, 20 bp, Artificial Sequence
  Description of Artificial Sequence: Synthetic oligonucleotide
aggaggcagagttggacaag

SEQ ID NO: 1888 - DNA, 20 bp, Artificial Sequence
  Description of Artificial Sequence: Synthetic oligonucleotide
ggaggcagagttggacaagt

SEQ ID NO: 1889 - DNA, 20 bp, Artificial Sequence
  Description of Artificial Sequence: Synthetic oligonucleotide
gaggcagagttggacaagta

SEQ ID NO: 1890 - DNA, 20 bp, Artificial Sequence
  Description of Artificial Sequence: Synthetic oligonucleotide
aggcagagttggacaagtac

SEQ ID NO: 1891 - DNA, 20 bp, Artificial Sequence
  Description of Artificial Sequence: Synthetic oligonucleotide
ggcagagttggacaagtacc

SEQ ID NO: 1892 - DNA, 20 bp, Artificial Sequence
  Description of Artificial Sequence: Synthetic oligonucleotide
gcagagttggacaagtacct

SEQ ID NO: 1893 - DNA, 20 bp, Artificial Sequence
  Description of Artificial Sequence: Synthetic oligonucleotide
cagagttggacaagtacctg

SEQ ID NO: 1894 - DNA, 20 bp, Artificial Sequence
  Description of Artificial Sequence: Synthetic oligonucleotide
agagttggacaagtacctgg

SEQ ID NO: 1895 - DNA, 20 bp, Artificial Sequence
  Description of Artificial Sequence: Synthetic oligonucleotide
gagttggacaagtacctgga

SEQ ID NO: 1896 - DNA, 20 bp, Artificial Sequence
  Description of Artificial Sequence: Synthetic oligonucleotide
agttggacaagtacctggaa

SEQ ID NO: 1897 - DNA, 20 bp, Artificial Sequence
  Description of Artificial Sequence: Synthetic oligonucleotide
gttggacaagtacctggaat

SEQ ID NO: 1898 - DNA, 20 bp, Artificial Sequence
  Description of Artificial Sequence: Synthetic oligonucleotide
ttggacaagtacctggaatg

SEQ ID NO: 1899 - DNA, 20 bp, Artificial Sequence
  Description of Artificial Sequence: Synthetic oligonucleotide
tggacaagtacctggaatgc

SEQ ID NO: 1900 - DNA, 20 bp, Artificial Sequence
  Description of Artificial Sequence: Synthetic oligonucleotide
ggacaagtacctggaatgca

SEQ ID NO: 1901 - DNA, 20 bp, Artificial Sequence
  Description of Artificial Sequence: Synthetic oligonucleotide
gacaagtacctggaatgcag

SEQ ID NO: 1902 - DNA, 20 bp, Artificial Sequence
  Description of Artificial Sequence: Synthetic oligonucleotide
acaagtacctggaatgcaga

SEQ ID NO: 1903 - DNA, 20 bp, Artificial Sequence
  Description of Artificial Sequence: Synthetic oligonucleotide
caagtacctggaatgcagag

SEQ ID NO: 1904 - DNA, 20 bp, Artificial Sequence
  Description of Artificial Sequence: Synthetic oligonucleotide
aagtacctggaatgcagagt

SEQ ID NO: 1905 - DNA, 20 bp, Artificial Sequence
  Description of Artificial Sequence: Synthetic oligonucleotide
agtacctggaatgcagagta

SEQ ID NO: 1906 - DNA, 20 bp, Artificial Sequence
  Description of Artificial Sequence: Synthetic oligonucleotide
gtacctggaatgcagagtag

SEQ ID NO: 1907 - DNA, 20 bp, Artificial Sequence
  Description of Artificial Sequence: Synthetic oligonucleotide
tacctggaatgcagagtaga

SEQ ID NO: 1908 - DNA, 20 bp, Artificial Sequence
  Description of Artificial Sequence: Synthetic oligonucleotide
acctggaatgcagagtagaa

SEQ ID NO: 1909 - DNA, 20 bp, Artificial Sequence
  Description of Artificial Sequence: Synthetic oligonucleotide
cctggaatgcagagtagaag

SEQ ID NO: 1910 - RNA, 20 nt, Artificial Sequence
  Description of Artificial Sequence: Synthetic oligonucleotide
augucuugauccucuagguc

SEQ ID NO: 1911 - RNA, 20 nt, Artificial Sequence
  Description of Artificial Sequence: Synthetic oligonucleotide
uaugucuugauccucuaggu

SEQ ID NO: 1912 - RNA, 20 nt, Artificial Sequence
  Description of Artificial Sequence: Synthetic oligonucleotide
uuaugucuugauccucuagg

SEQ ID NO: 1913 - RNA, 20 nt, Artificial Sequence
  Description of Artificial Sequence: Synthetic oligonucleotide
auuaugucuugauccucuag

SEQ ID NO: 1914 - RNA, 20 nt, Artificial Sequence
  Description of Artificial Sequence: Synthetic oligonucleotide
cauuaugucuugauccucua

SEQ ID NO: 1915 - RNA, 20 nt, Artificial Sequence
  Description of Artificial Sequence: Synthetic oligonucleotide
ccauuaugucuugauccucu

SEQ ID NO: 1916 - RNA, 20 nt, Artificial Sequence
  Description of Artificial Sequence: Synthetic oligonucleotide
cccauuaugucuugauccuc

SEQ ID NO: 1917 - RNA, 20 nt, Artificial Sequence
  Description of Artificial Sequence: Synthetic oligonucleotide
ucccauuaugucuugauccu

SEQ ID NO: 1918 - RNA, 20 nt, Artificial Sequence
  Description of Artificial Sequence: Synthetic oligonucleotide
cucccauuaugucuugaucc

SEQ ID NO: 1919 - RNA, 20 nt, Artificial Sequence
  Description of Artificial Sequence: Synthetic oligonucleotide
gcucccauuaugucuugauc

SEQ ID NO: 1920 - RNA, 20 nt, Artificial Sequence
  Description of Artificial Sequence: Synthetic oligonucleotide
ugcucccauuaugucuugau

SEQ ID NO: 1921 - RNA, 20 nt, Artificial Sequence
  Description of Artificial Sequence: Synthetic oligonucleotide
augcucccauuaugucuuga

SEQ ID NO: 1922 - RNA, 20 nt, Artificial Sequence
  Description of Artificial Sequence: Synthetic oligonucleotide
aaugcucccauuaugucuug

SEQ ID NO: 1923 - RNA, 20 nt, Artificial Sequence
  Description of Artificial Sequence: Synthetic oligonucleotide
aaaugcucccauuaugucuu

SEQ ID NO: 1924 - RNA, 20 nt, Artificial Sequence
  Description of Artificial Sequence: Synthetic oligonucleotide
aaaaugcucccauuaugucu

SEQ ID NO: 1925 - RNA, 20 nt, Artificial Sequence
  Description of Artificial Sequence: Synthetic oligonucleotide
aaaaaugcucccauuauguc

SEQ ID NO: 1926 - RNA, 20 nt, Artificial Sequence
  Description of Artificial Sequence: Synthetic oligonucleotide
uaaaaaugcucccauuaugu

SEQ ID NO: 1927 - RNA, 20 nt, Artificial Sequence
  Description of Artificial Sequence: Synthetic oligonucleotide
cuaaaaaugcucccauuaug

SEQ ID NO: 1928 - RNA, 20 nt, Artificial Sequence
  Description of Artificial Sequence: Synthetic oligonucleotide
ucuaaaaaugcucccauuau

SEQ ID NO: 1929 - RNA, 20 nt, Artificial Sequence
  Description of Artificial Sequence: Synthetic oligonucleotide
gucuaaaaaugcucccauua

SEQ ID NO: 1930 - RNA, 20 nt, Artificial Sequence
  Description of Artificial Sequence: Synthetic oligonucleotide
ugucuaaaaaugcucccauu

SEQ ID NO: 1931 - RNA, 20 nt, Artificial Sequence
  Description of Artificial Sequence: Synthetic oligonucleotide
uugucuaaaaaugcucccau

SEQ ID NO: 1932 - RNA, 20 nt, Artificial Sequence
  Description of Artificial Sequence: Synthetic oligonucleotide
cuugucuaaaaaugcuccca

SEQ ID NO: 1933 - RNA, 20 nt, Artificial Sequence
  Description of Artificial Sequence: Synthetic oligonucleotide
gcuugucuaaaaaugcuccc

SEQ ID NO: 1934 - RNA, 20 nt, Artificial Sequence
  Description of Artificial Sequence: Synthetic oligonucleotide
ggcuugucuaaaaaugcucc

SEQ ID NO: 1935 - RNA, 20 nt, Artificial Sequence
  Description of Artificial Sequence: Synthetic oligonucleotide
uggcuugucuaaaaaugcuc

SEQ ID NO: 1936 - RNA, 20 nt, Artificial Sequence
  Description of Artificial Sequence: Synthetic oligonucleotide
uuggcuugucuaaaaaugcu

SEQ ID NO: 1937 - RNA, 20 nt, Artificial Sequence
  Description of Artificial Sequence: Synthetic oligonucleotide
uuuggcuugucuaaaaaugc

SEQ ID NO: 1938 - RNA, 20 nt, Artificial Sequence
  Description of Artificial Sequence: Synthetic oligonucleotide
cuuuggcuugucuaaaaaug

SEQ ID NO: 1939 - RNA, 20 nt, Artificial Sequence
  Description of Artificial Sequence: Synthetic oligonucleotide
ucuuuggcuugucuaaaaau

SEQ ID NO: 1940 - RNA, 20 nt, Artificial Sequence
  Description of Artificial Sequence: Synthetic oligonucleotide
aucuuuggcuugucuaaaaa

SEQ ID NO: 1941 - RNA, 20 nt, Artificial Sequence
  Description of Artificial Sequence: Synthetic oligonucleotide
caucuuuggcuugucuaaaa

SEQ ID NO: 1942 - RNA, 20 nt, Artificial Sequence
  Description of Artificial Sequence: Synthetic oligonucleotide
ccaucuuuggcuugucuaaa

SEQ ID NO: 1943 - RNA, 20 nt, Artificial Sequence
  Description of Artificial Sequence: Synthetic oligonucleotide
uccaucuuuggcuugucuaa

SEQ ID NO: 1944 - RNA, 20 nt, Artificial Sequence
  Description of Artificial Sequence: Synthetic oligonucleotide
uuccaucuuuggcuugucua

SEQ ID NO: 1945 - RNA, 20 nt, Artificial Sequence
  Description of Artificial Sequence: Synthetic oligonucleotide
uuuccaucuuuggcuugucu

SEQ ID NO: 1946 - RNA, 20 nt, Artificial Sequence
  Description of Artificial Sequence: Synthetic oligonucleotide
uuuuccaucuuuggcuuguc

SEQ ID NO: 1947 - RNA, 20 nt, Artificial Sequence
  Description of Artificial Sequence: Synthetic oligonucleotide
cuuuuccaucuuuggcuugu

SEQ ID NO: 1948 - RNA, 20 nt, Artificial Sequence
  Description of Artificial Sequence: Synthetic oligonucleotide
gcuuuuccaucuuuggcuug

SEQ ID NO: 1949 - RNA, 20 nt, Artificial Sequence
  Description of Artificial Sequence: Synthetic oligonucleotide
ugcuuuuccaucuuuggcuu

SEQ ID NO: 1950 - RNA, 20 nt, Artificial Sequence
  Description of Artificial Sequence: Synthetic oligonucleotide
augcuuuuccaucuuuggcu

SEQ ID NO: 1951 - RNA, 20 nt, Artificial Sequence
  Description of Artificial Sequence: Synthetic oligonucleotide
uaugcuuuuccaucuuuggc

SEQ ID NO: 1952 - RNA, 20 nt, Artificial Sequence
  Description of Artificial Sequence: Synthetic oligonucleotide
uuaugcuuuuccaucuuugg

SEQ ID NO: 1953 - RNA, 20 nt, Artificial Sequence
  Description of Artificial Sequence: Synthetic oligonucleotide
auuaugcuuuuccaucuuug

SEQ ID NO: 1954 - RNA, 20 nt, Artificial Sequence
  Description of Artificial Sequence: Synthetic oligonucleotide
cauuaugcuuuuccaucuuu

SEQ ID NO: 1955 - RNA, 20 nt, Artificial Sequence
  Description of Artificial Sequence: Synthetic oligonucleotide
gcauuaugcuuuuccaucuu

SEQ ID NO: 1956 - RNA, 20 nt, Artificial Sequence
  Description of Artificial Sequence: Synthetic oligonucleotide
ggcauuaugcuuuuccaucu

SEQ ID NO: 1957 - RNA, 20 nt, Artificial Sequence
  Description of Artificial Sequence: Synthetic oligonucleotide
gggcauuaugcuuuuccauc

SEQ ID NO: 1958 - RNA, 20 nt, Artificial Sequence
  Description of Artificial Sequence: Synthetic oligonucleotide
ugggcauuaugcuuuuccau

SEQ ID NO: 1959 - RNA, 20 nt, Artificial Sequence
  Description of Artificial Sequence: Synthetic oligonucleotide
cugggcauuaugcuuuucca

SEQ ID NO: 1960 - RNA, 20 nt, Artificial Sequence
  Description of Artificial Sequence: Synthetic oligonucleotide
ccugggcauuaugcuuuucc

SEQ ID NO: 1961 - RNA, 20 nt, Artificial Sequence
  Description of Artificial Sequence: Synthetic oligonucleotide
cccugggcauuaugcuuuuc

SEQ ID NO: 1962 - RNA, 20 nt, Artificial Sequence
  Description of Artificial Sequence: Synthetic oligonucleotide
ccccugggcauuaugcuuuu

SEQ ID NO: 1963 - RNA, 20 nt, Artificial Sequence
  Description of Artificial Sequence: Synthetic oligonucleotide
gccccugggcauuaugcuuu

SEQ ID NO: 1964 - RNA, 20 nt, Artificial Sequence
  Description of Artificial Sequence: Synthetic oligonucleotide
ugccccugggcauuaugcuu

SEQ ID NO: 1965 - RNA, 20 nt, Artificial Sequence
  Description of Artificial Sequence: Synthetic oligonucleotide
cugccccugggcauuaugcu

SEQ ID NO: 1966 - RNA, 20 nt, Artificial Sequence
  Description of Artificial Sequence: Synthetic oligonucleotide
ccugccccugggcauuaugc

SEQ ID NO: 1967 - RNA, 20 nt, Artificial Sequence
  Description of Artificial Sequence: Synthetic oligonucleotide
cccugccccugggcauuaug

SEQ ID NO: 1968 - RNA, 20 nt, Artificial Sequence
  Description of Artificial Sequence: Synthetic oligonucleotide
acccugccccugggcauuau

SEQ ID NO: 1969 - RNA, 20 nt, Artificial Sequence
  Description of Artificial Sequence: Synthetic oligonucleotide
uacccugccccugggcauua

SEQ ID NO: 1970 - RNA, 20 nt, Artificial Sequence
  Description of Artificial Sequence: Synthetic oligonucleotide
uuacccugccccugggcauu

SEQ ID NO: 1971 - RNA, 20 nt, Artificial Sequence
  Description of Artificial Sequence: Synthetic oligonucleotide
auuacccugccccugggcau

SEQ ID NO: 1972 - RNA, 20 nt, Artificial Sequence
  Description of Artificial Sequence: Synthetic oligonucleotide
cauuacccugccccugggca

SEQ ID NO: 1973 - RNA, 20 nt, Artificial Sequence
  Description of Artificial Sequence: Synthetic oligonucleotide
ccauuacccugccccugggc

SEQ ID NO: 1974 - RNA, 20 nt, Artificial Sequence
  Description of Artificial Sequence: Synthetic oligonucleotide
cccauuacccugccccuggg

SEQ ID NO: 1975 - RNA, 20 nt, Artificial Sequence
  Description of Artificial Sequence: Synthetic oligonucleotide
acccauuacccugccccugg

SEQ ID NO: 1976 - RNA, 20 nt, Artificial Sequence
  Description of Artificial Sequence: Synthetic oligonucleotide
aacccauuacccugccccug

SEQ ID NO: 1977 - RNA, 20 nt, Artificial Sequence
  Description of Artificial Sequence: Synthetic oligonucleotide
caacccauuacccugccccu

SEQ ID NO: 1978 - RNA, 20 nt, Artificial Sequence
  Description of Artificial Sequence: Synthetic oligonucleotide
gcaacccauuacccugcccc

SEQ ID NO: 1979 - RNA, 20 nt, Artificial Sequence
  Description of Artificial Sequence: Synthetic oligonucleotide
cgcaacccauuacccugccc

SEQ ID NO: 1980 - RNA, 20 nt, Artificial Sequence
  Description of Artificial Sequence: Synthetic oligonucleotide
ucgcaacccauuacccugcc

SEQ ID NO: 1981 - RNA, 20 nt, Artificial Sequence
  Description of Artificial Sequence: Synthetic oligonucleotide
aucgcaacccauuacccugc

SEQ ID NO: 1982 - RNA, 20 nt, Artificial Sequence
  Description of Artificial Sequence: Synthetic oligonucleotide
uaucgcaacccauuacccug

SEQ ID NO: 1983 - RNA, 20 nt, Artificial Sequence
  Description of Artificial Sequence: Synthetic oligonucleotide
auaucgcaacccauuacccu

SEQ ID NO: 1984 - RNA, 20 nt, Artificial Sequence
  Description of Artificial Sequence: Synthetic oligonucleotide
cauaucgcaacccauuaccc

SEQ ID NO: 1985 - RNA, 20 nt, Artificial Sequence
  Description of Artificial Sequence: Synthetic oligonucleotide
ccauaucgcaacccauuacc

SEQ ID NO: 1986 - RNA, 20 nt, Artificial Sequence
  Description of Artificial Sequence: Synthetic oligonucleotide
cccauaucgcaacccauuac

SEQ ID NO: 1987 - RNA, 20 nt, Artificial Sequence
  Description of Artificial Sequence: Synthetic oligonucleotide
gcccauaucgcaacccauua

SEQ ID NO: 1988 - RNA, 20 nt, Artificial Sequence
  Description of Artificial Sequence: Synthetic oligonucleotide
agcccauaucgcaacccauu

SEQ ID NO: 1989 - RNA, 20 nt, Artificial Sequence
  Description of Artificial Sequence: Synthetic oligonucleotide
uagcccauaucgcaacccau

SEQ ID NO: 1990 - RNA, 20 nt, Artificial Sequence
  Description of Artificial Sequence: Synthetic oligonucleotide
uuagcccauaucgcaaccca

SEQ ID NO: 1991 - RNA, 20 nt, Artificial Sequence
  Description of Artificial Sequence: Synthetic oligonucleotide
cuuagcccauaucgcaaccc

SEQ ID NO: 1992 - RNA, 20 nt, Artificial Sequence
  Description of Artificial Sequence: Synthetic oligonucleotide
gcuuagcccauaucgcaacc

SEQ ID NO: 1993 - RNA, 20 nt, Artificial Sequence
  Description of Artificial Sequence: Synthetic oligonucleotide
ugcuuagcccauaucgcaac

SEQ ID NO: 1994 - RNA, 20 nt, Artificial Sequence
  Description of Artificial Sequence: Synthetic oligonucleotide
cugcuuagcccauaucgcaa

SEQ ID NO: 1995 - RNA, 20 nt, Artificial Sequence
  Description of Artificial Sequence: Synthetic oligonucleotide
gcugcuuagcccauaucgca

SEQ ID NO: 1996 - RNA, 20 nt, Artificial Sequence
  Description of Artificial Sequence: Synthetic oligonucleotide
ugcugcuuagcccauaucgc

SEQ ID NO: 1997 - RNA, 20 nt, Artificial Sequence
  Description of Artificial Sequence: Synthetic oligonucleotide
augcugcuuagcccauaucg

SEQ ID NO: 1998 - RNA, 20 nt, Artificial Sequence
  Description of Artificial Sequence: Synthetic oligonucleotide
caugcugcuuagcccauauc

SEQ ID NO: 1999 - RNA, 20 nt, Artificial Sequence
  Description of Artificial Sequence: Synthetic oligonucleotide
gcaugcugcuuagcccauau

SEQ ID NO: 2000 - RNA, 20 nt, Artificial Sequence
  Description of Artificial Sequence: Synthetic oligonucleotide
ugcaugcugcuuagcccaua

SEQ ID NO: 2001 - RNA, 20 nt, Artificial Sequence
  Description of Artificial Sequence: Synthetic oligonucleotide
uugcaugcugcuuagcccau

SEQ ID NO: 2002 - RNA, 20 nt, Artificial Sequence
  Description of Artificial Sequence: Synthetic oligonucleotide
cuugcaugcugcuuagccca

SEQ ID NO: 2003 - RNA, 20 nt, Artificial Sequence
  Description of Artificial Sequence: Synthetic oligonucleotide
ccuugcaugcugcuuagccc

SEQ ID NO: 2004 - RNA, 20 nt, Artificial Sequence
  Description of Artificial Sequence: Synthetic oligonucleotide
gccuugcaugcugcuuagcc

SEQ ID NO: 2005 - RNA, 20 nt, Artificial Sequence
  Description of Artificial Sequence: Synthetic oligonucleotide
agccuugcaugcugcuuagc

SEQ ID NO: 2006 - RNA, 20 nt, Artificial Sequence
  Description of Artificial Sequence: Synthetic oligonucleotide
cagccuugcaugcugcuuag

SEQ ID NO: 2007 - RNA, 20 nt, Artificial Sequence
  Description of Artificial Sequence: Synthetic oligonucleotide
ccagccuugcaugcugcuua

SEQ ID NO: 2008 - RNA, 20 nt, Artificial Sequence
  Description of Artificial Sequence: Synthetic oligonucleotide
gccagccuugcaugcugcuu

SEQ ID NO: 2009 - RNA, 20 nt, Artificial Sequence
  Description of Artificial Sequence: Synthetic oligonucleotide
cgccagccuugcaugcugcu

SEQ ID NO: 2010 - RNA, 20 nt, Artificial Sequence
  Description of Artificial Sequence: Synthetic oligonucleotide
acgccagccuugcaugcugc

SEQ ID NO: 2011 - RNA, 20 nt, Artificial Sequence
  Description of Artificial Sequence: Synthetic oligonucleotide
cacgccagccuugcaugcug

SEQ ID NO: 2012 - RNA, 20 nt, Artificial Sequence
  Description of Artificial Sequence: Synthetic oligonucleotide
acacgccagccuugcaugcu

SEQ ID NO: 2013 - RNA, 20 nt, Artificial Sequence
  Description of Artificial Sequence: Synthetic oligonucleotide
aacacgccagccuugcaugc

SEQ ID NO: 2014 - RNA, 20 nt, Artificial Sequence
  Description of Artificial Sequence: Synthetic oligonucleotide
caacacgccagccuugcaug

SEQ ID NO: 2015 - RNA, 20 nt, Artificial Sequence
  Description of Artificial Sequence: Synthetic oligonucleotide
ucaacacgccagccuugcau

SEQ ID NO: 2016 - RNA, 20 nt, Artificial Sequence
  Description of Artificial Sequence: Synthetic oligonucleotide
uucaacacgccagccuugca

SEQ ID NO: 2017 - RNA, 20 nt, Artificial Sequence
  Description of Artificial Sequence: Synthetic oligonucleotide
uuucaacacgccagccuugc

SEQ ID NO: 2018 - RNA, 20 nt, Artificial Sequence
  Description of Artificial Sequence: Synthetic oligonucleotide
auuucaacacgccagccuug

SEQ ID NO: 2019 - RNA, 20 nt, Artificial Sequence
  Description of Artificial Sequence: Synthetic oligonucleotide
cauuucaacacgccagccuu

SEQ ID NO: 2020 - RNA, 20 nt, Artificial Sequence
  Description of Artificial Sequence: Synthetic oligonucleotide
ccauuucaacacgccagccu

SEQ ID NO: 2021 - RNA, 20 nt, Artificial Sequence
  Description of Artificial Sequence: Synthetic oligonucleotide
uccauuucaacacgccagcc

SEQ ID NO: 2022 - RNA, 20 nt, Artificial Sequence
  Description of Artificial Sequence: Synthetic oligonucleotide
cuccauuucaacacgccagc

SEQ ID NO: 2023 - RNA, 20 nt, Artificial Sequence
  Description of Artificial Sequence: Synthetic oligonucleotide
ccuccauuucaacacgccag

SEQ ID NO: 2024 - RNA, 20 nt, Artificial Sequence
  Description of Artificial Sequence: Synthetic oligonucleotide
uccuccauuucaacacgcca

SEQ ID NO: 2025 - RNA, 20 nt, Artificial Sequence
  Description of Artificial Sequence: Synthetic oligonucleotide
auccuccauuucaacacgcc

SEQ ID NO: 2026 - RNA, 20 nt, Artificial Sequence
  Description of Artificial Sequence: Synthetic oligonucleotide
cauccuccauuucaacacgc

SEQ ID NO: 2027 - RNA, 20 nt, Artificial Sequence
  Description of Artificial Sequence: Synthetic oligonucleotide
gcauccuccauuucaacacg

SEQ ID NO: 2028 - RNA, 20 nt, Artificial Sequence
  Description of Artificial Sequence: Synthetic oligonucleotide
ugcauccuccauuucaacac

SEQ ID NO: 2029 - RNA, 20 nt, Artificial Sequence
  Description of Artificial Sequence: Synthetic oligonucleotide
gugcauccuccauuucaaca

SEQ ID NO: 2030 - RNA, 20 nt, Artificial Sequence
  Description of Artificial Sequence: Synthetic oligonucleotide
ugugcauccuccauuucaac

SEQ ID NO: 2031 - RNA, 20 nt, Artificial Sequence
  Description of Artificial Sequence: Synthetic oligonucleotide
augugcauccuccauuucaa

SEQ ID NO: 2032 - RNA, 20 nt, Artificial Sequence
  Description of Artificial Sequence: Synthetic oligonucleotide
uaugugcauccuccauuuca

SEQ ID NO: 2033 - RNA, 20 nt, Artificial Sequence
  Description of Artificial Sequence: Synthetic oligonucleotide
guaugugcauccuccauuuc

SEQ ID NO: 2034 - RNA, 20 nt, Artificial Sequence
  Description of Artificial Sequence: Synthetic oligonucleotide
cguaugugcauccuccauuu

SEQ ID NO: 2035 - RNA, 20 nt, Artificial Sequence
  Description of Artificial Sequence: Synthetic oligonucleotide
ccguaugugcauccuccauu

SEQ ID NO: 2036 - RNA, 20 nt, Artificial Sequence
  Description of Artificial Sequence: Synthetic oligonucleotide
gccguaugugcauccuccau

SEQ ID NO: 2037 - RNA, 20 nt, Artificial Sequence
  Description of Artificial Sequence: Synthetic oligonucleotide
agccguaugugcauccucca

SEQ ID NO: 2038 - RNA, 20 nt, Artificial Sequence
  Description of Artificial Sequence: Synthetic oligonucleotide
cagccguaugugcauccucc

SEQ ID NO: 2039 - RNA, 20 nt, Artificial Sequence
  Description of Artificial Sequence: Synthetic oligonucleotide
acagccguaugugcauccuc

SEQ ID NO: 2040 - RNA, 20 nt, Artificial Sequence
  Description of Artificial Sequence: Synthetic oligonucleotide
cacagccguaugugcauccu

SEQ ID NO: 2041 - RNA, 20 nt, Artificial Sequence
  Description of Artificial Sequence: Synthetic oligonucleotide
ucacagccguaugugcaucc

SEQ ID NO: 2042 - RNA, 20 nt, Artificial Sequence
  Description of Artificial Sequence: Synthetic oligonucleotide
aucacagccguaugugcauc

SEQ ID NO: 2043 - RNA, 20 nt, Artificial Sequence
  Description of Artificial Sequence: Synthetic oligonucleotide
gaucacagccguaugugcau

SEQ ID NO: 2044 - RNA, 20 nt, Artificial Sequence
  Description of Artificial Sequence: Synthetic oligonucleotide
cgaucacagccguaugugca

SEQ ID NO: 2045 - RNA, 20 nt, Artificial Sequence
  Description of Artificial Sequence: Synthetic oligonucleotide
ccgaucacagccguaugugc

SEQ ID NO: 2046 - RNA, 20 nt, Artificial Sequence
  Description of Artificial Sequence: Synthetic oligonucleotide
accgaucacagccguaugug

SEQ ID NO: 2047 - RNA, 20 nt, Artificial Sequence
  Description of Artificial Sequence: Synthetic oligonucleotide
aaccgaucacagccguaugu

SEQ ID NO: 2048 - RNA, 20 nt, Artificial Sequence
  Description of Artificial Sequence: Synthetic oligonucleotide
aaaccgaucacagccguaug

SEQ ID NO: 2049 - RNA, 20 nt, Artificial Sequence
  Description of Artificial Sequence: Synthetic oligonucleotide
caaaccgaucacagccguau

SEQ ID NO: 2050 - RNA, 20 nt, Artificial Sequence
  Description of Artificial Sequence: Synthetic oligonucleotide
gcaaaccgaucacagccgua

SEQ ID NO: 2051 - RNA, 20 nt, Artificial Sequence
  Description of Artificial Sequence: Synthetic oligonucleotide
ggcaaaccgaucacagccgu

SEQ ID NO: 2052 - RNA, 20 nt, Artificial Sequence
  Description of Artificial Sequence: Synthetic oligonucleotide
uggcaaaccgaucacagccg

SEQ ID NO: 2053 - RNA, 20 nt, Artificial Sequence
  Description of Artificial Sequence: Synthetic oligonucleotide
uuggcaaaccgaucacagcc

SEQ ID NO: 2054 - RNA, 20 nt, Artificial Sequence
  Description of Artificial Sequence: Synthetic oligonucleotide
cuuggcaaaccgaucacagc

SEQ ID NO: 2055 - RNA, 20 nt, Artificial Sequence
  Description of Artificial Sequence: Synthetic oligonucleotide
acuuggcaaaccgaucacag

SEQ ID NO: 2056 - RNA, 20 nt, Artificial Sequence
  Description of Artificial Sequence: Synthetic oligonucleotide
cacuuggcaaaccgaucaca

SEQ ID NO: 2057 - RNA, 20 nt, Artificial Sequence
  Description of Artificial Sequence: Synthetic oligonucleotide
ccacuuggcaaaccgaucac

SEQ ID NO: 2058 - RNA, 20 nt, Artificial Sequence
  Description of Artificial Sequence: Synthetic oligonucleotide
uccacuuggcaaaccgauca

SEQ ID NO: 2059 - RNA, 20 nt, Artificial Sequence
  Description of Artificial Sequence: Synthetic oligonucleotide
guccacuuggcaaaccgauc

SEQ ID NO: 2060 - RNA, 20 nt, Artificial Sequence
  Description of Artificial Sequence: Synthetic oligonucleotide
aguccacuuggcaaaccgau

SEQ ID NO: 2061 - RNA, 20 nt, Artificial Sequence
  Description of Artificial Sequence: Synthetic oligonucleotide
aaguccacuuggcaaaccga

SEQ ID NO: 2062 - RNA, 20 nt, Artificial Sequence
  Description of Artificial Sequence: Synthetic oligonucleotide
caaguccacuuggcaaaccg

SEQ ID NO: 2063 - RNA, 20 nt, Artificial Sequence
  Description of Artificial Sequence: Synthetic oligonucleotide
ucaaguccacuuggcaaacc

SEQ ID NO: 2064 - RNA, 20 nt, Artificial Sequence
  Description of Artificial Sequence: Synthetic oligonucleotide
uucaaguccacuuggcaaac

SEQ ID NO: 2065 - RNA, 20 nt, Artificial Sequence
  Description of Artificial Sequence: Synthetic oligonucleotide
auucaaguccacuuggcaaa

SEQ ID NO: 2066 - RNA, 20 nt, Artificial Sequence
  Description of Artificial Sequence: Synthetic oligonucleotide
gauucaaguccacuuggcaa

SEQ ID NO: 2067 - RNA, 20 nt, Artificial Sequence
  Description of Artificial Sequence: Synthetic oligonucleotide
cgauucaaguccacuuggca

SEQ ID NO: 2068 - RNA, 20 nt, Artificial Sequence
  Description of Artificial Sequence: Synthetic oligonucleotide
acgauucaaguccacuuggc

SEQ ID NO: 2069 - RNA, 20 nt, Artificial Sequence
  Description of Artificial Sequence: Synthetic oligonucleotide
cacgauucaaguccacuugg

SEQ ID NO: 2070 - RNA, 20 nt, Artificial Sequence
  Description of Artificial Sequence: Synthetic oligonucleotide
ccacgauucaaguccacuug

SEQ ID NO: 2071 - RNA, 20 nt, Artificial Sequence
  Description of Artificial Sequence: Synthetic oligonucleotide
accacgauucaaguccacuu

SEQ ID NO: 2072 - RNA, 20 nt, Artificial Sequence
  Description of Artificial Sequence: Synthetic oligonucleotide
gaccacgauucaaguccacu

SEQ ID NO: 2073 - RNA, 20 nt, Artificial Sequence
  Description of Artificial Sequence: Synthetic oligonucleotide
ugaccacgauucaaguccac

SEQ ID NO: 2074 - RNA, 20 nt, Artificial Sequence
  Description of Artificial Sequence: Synthetic oligonucleotide
augaccacgauucaagucca

SEQ ID NO: 2075 - RNA, 20 nt, Artificial Sequence
  Description of Artificial Sequence: Synthetic oligonucleotide
aaugaccacgauucaagucc

SEQ ID NO: 2076 - RNA, 20 nt, Artificial Sequence
  Description of Artificial Sequence: Synthetic oligonucleotide
gaaugaccacgauucaaguc

SEQ ID NO: 2077 - RNA, 20 nt, Artificial Sequence
  Description of Artificial Sequence: Synthetic oligonucleotide
agaaugaccacgauucaagu

SEQ ID NO: 2078 - RNA, 20 nt, Artificial Sequence
  Description of Artificial Sequence: Synthetic oligonucleotide
aagaaugaccacgauucaag

SEQ ID NO: 2079 - RNA, 20 nt, Artificial Sequence
  Description of Artificial Sequence: Synthetic oligonucleotide
aaagaaugaccacgauucaa

SEQ ID NO: 2080 - RNA, 20 nt, Artificial Sequence
  Description of Artificial Sequence: Synthetic oligonucleotide
caaagaaugaccacgauuca

SEQ ID NO: 2081 - RNA, 20 nt, Artificial Sequence
  Description of Artificial Sequence: Synthetic oligonucleotide
gcaaagaaugaccacgauuc

SEQ ID NO: 2082 - RNA, 20 nt, Artificial Sequence
  Description of Artificial Sequence: Synthetic oligonucleotide
agcaaagaaugaccacgauu

SEQ ID NO: 2083 - RNA, 20 nt, Artificial Sequence
  Description of Artificial Sequence: Synthetic oligonucleotide
cagcaaagaaugaccacgau

SEQ ID NO: 2084 - RNA, 20 nt, Artificial Sequence
  Description of Artificial Sequence: Synthetic oligonucleotide
acagcaaagaaugaccacga

SEQ ID NO: 2085 - RNA, 20 nt, Artificial Sequence
  Description of Artificial Sequence: Synthetic oligonucleotide
cacagcaaagaaugaccacg

SEQ ID NO: 2086 - RNA, 20 nt, Artificial Sequence
  Description of Artificial Sequence: Synthetic oligonucleotide
acacagcaaagaaugaccac

SEQ ID NO: 2087 - RNA, 20 nt, Artificial Sequence
  Description of Artificial Sequence: Synthetic oligonucleotide
uacacagcaaagaaugacca

SEQ ID NO: 2088 - RNA, 20 nt, Artificial Sequence
  Description of Artificial Sequence: Synthetic oligonucleotide
auacacagcaaagaaugacc

SEQ ID NO: 2089 - RNA, 20 nt, Artificial Sequence
  Description of Artificial Sequence: Synthetic oligonucleotide
cauacacagcaaagaaugac

SEQ ID NO: 2090 - RNA, 20 nt, Artificial Sequence
  Description of Artificial Sequence: Synthetic oligonucleotide
ucauacacagcaaagaauga

SEQ ID NO: 2091 - RNA, 20 nt, Artificial Sequence
  Description of Artificial Sequence: Synthetic oligonucleotide
aucauacacagcaaagaaug

SEQ ID NO: 2092 - RNA, 20 nt, Artificial Sequence
  Description of Artificial Sequence: Synthetic oligonucleotide
caucauacacagcaaagaau

SEQ ID NO: 2093 - RNA, 20 nt, Artificial Sequence
  Description of Artificial Sequence: Synthetic oligonucleotide
ccaucauacacagcaaagaa

SEQ ID NO: 2094 - RNA, 20 nt, Artificial Sequence
  Description of Artificial Sequence: Synthetic oligonucleotide
cccaucauacacagcaaaga

SEQ ID NO: 2095 - RNA, 20 nt, Artificial Sequence
  Description of Artificial Sequence: Synthetic oligonucleotide
gcccaucauacacagcaaag

SEQ ID NO: 2096 - RNA, 20 nt, Artificial Sequence
  Description of Artificial Sequence: Synthetic oligonucleotide
ugcccaucauacacagcaaa

SEQ ID NO: 2097 - RNA, 20 nt, Artificial Sequence
  Description of Artificial Sequence: Synthetic oligonucleotide
augcccaucauacacagcaa

SEQ ID NO: 2098 - RNA, 20 nt, Artificial Sequence
  Description of Artificial Sequence: Synthetic oligonucleotide
caugcccaucauacacagca

SEQ ID NO: 2099 - RNA, 20 nt, Artificial Sequence
  Description of Artificial Sequence: Synthetic oligonucleotide
gcaugcccaucauacacagc

SEQ ID NO: 2100 - RNA, 20 nt, Artificial Sequence
  Description of Artificial Sequence: Synthetic oligonucleotide
agcaugcccaucauacacag

SEQ ID NO: 2101 - RNA, 20 nt, Artificial Sequence
  Description of Artificial Sequence: Synthetic oligonucleotide
cagcaugcccaucauacaca

SEQ ID NO: 2102 - RNA, 20 nt, Artificial Sequence
  Description of Artificial Sequence: Synthetic oligonucleotide
ccagcaugcccaucauacac

SEQ ID NO: 2103 - RNA, 20 nt, Artificial Sequence
  Description of Artificial Sequence: Synthetic oligonucleotide
accagcaugcccaucauaca

SEQ ID NO: 2104 - RNA, 20 nt, Artificial Sequence
  Description of Artificial Sequence: Synthetic oligonucleotide
aaccagcaugcccaucauac

SEQ ID NO: 2105 - RNA, 20 nt, Artificial Sequence
  Description of Artificial Sequence: Synthetic oligonucleotide
gaaccagcaugcccaucaua

SEQ ID NO: 2106 - RNA, 20 nt, Artificial Sequence
  Description of Artificial Sequence: Synthetic oligonucleotide
agaaccagcaugcccaucau

SEQ ID NO: 2107 - RNA, 20 nt, Artificial Sequence
  Description of Artificial Sequence: Synthetic oligonucleotide
gagaaccagcaugcccauca

SEQ ID NO: 2108 - RNA, 20 nt, Artificial Sequence
  Description of Artificial Sequence: Synthetic oligonucleotide
ugagaaccagcaugcccauc

SEQ ID NO: 2109 - RNA, 20 nt, Artificial Sequence
  Description of Artificial Sequence: Synthetic oligonucleotide
cugagaaccagcaugcccau

SEQ ID NO: 2110 - RNA, 20 nt, Artificial Sequence
  Description of Artificial Sequence: Synthetic oligonucleotide
ccugagaaccagcaugccca

SEQ ID NO: 2111 - RNA, 20 nt, Artificial Sequence
  Description of Artificial Sequence: Synthetic oligonucleotide
accugagaaccagcaugccc

SEQ ID NO: 2112 - RNA, 20 nt, Artificial Sequence
  Description of Artificial Sequence: Synthetic oligonucleotide
aaccugagaaccagcaugcc

SEQ ID NO: 2113 - RNA, 20 nt, Artificial Sequence
  Description of Artificial Sequence: Synthetic oligonucleotide
caaccugagaaccagcaugc

SEQ ID NO: 2114 - RNA, 20 nt, Artificial Sequence
  Description of Artificial Sequence: Synthetic oligonucleotide
gcaaccugagaaccagcaug

SEQ ID NO: 2115 - RNA, 20 nt, Artificial Sequence
  Description of Artificial Sequence: Synthetic oligonucleotide
ggcaaccugagaaccagcau

SEQ ID NO: 2116 - RNA, 20 nt, Artificial Sequence
  Description of Artificial Sequence: Synthetic oligonucleotide
uggcaaccugagaaccagca

SEQ ID NO: 2117 - RNA, 20 nt, Artificial Sequence
  Description of Artificial Sequence: Synthetic oligonucleotide
uuggcaaccugagaaccagc

SEQ ID NO: 2118 - RNA, 20 nt, Artificial Sequence
  Description of Artificial Sequence: Synthetic oligonucleotide
uuuggcaaccugagaaccag

SEQ ID NO: 2119 - RNA, 20 nt, Artificial Sequence
  Description of Artificial Sequence: Synthetic oligonucleotide
auuuggcaaccugagaacca

SEQ ID NO: 2120 - RNA, 20 nt, Artificial Sequence
  Description of Artificial Sequence: Synthetic oligonucleotide
uauuuggcaaccugagaacc

SEQ ID NO: 2121 - RNA, 20 nt, Artificial Sequence
  Description of Artificial Sequence: Synthetic oligonucleotide
guauuuggcaaccugagaac

SEQ ID NO: 2122 - RNA, 20 nt, Artificial Sequence
  Description of Artificial Sequence: Synthetic oligonucleotide
aguauuuggcaaccugagaa

SEQ ID NO: 2123 - RNA, 20 nt, Artificial Sequence
  Description of Artificial Sequence: Synthetic oligonucleotide
caguauuuggcaaccugaga

SEQ ID NO: 2124 - RNA, 20 nt, Artificial Sequence
  Description of Artificial Sequence: Synthetic oligonucleotide
gcaguauuuggcaaccugag

SEQ ID NO: 2125 - RNA, 20 nt, Artificial Sequence
  Description of Artificial Sequence: Synthetic oligonucleotide
agcaguauuuggcaaccuga

SEQ ID NO: 2126 - RNA, 20 nt, Artificial Sequence
  Description of Artificial Sequence: Synthetic oligonucleotide
cagcaguauuuggcaaccug

SEQ ID NO: 2127 - RNA, 20 nt, Artificial Sequence
  Description of Artificial Sequence: Synthetic oligonucleotide
acagcaguauuuggcaaccu

SEQ ID NO: 2128 - RNA, 20 nt, Artificial Sequence
  Description of Artificial Sequence: Synthetic oligonucleotide
cacagcaguauuuggcaacc

SEQ ID NO: 2129 - RNA, 20 nt, Artificial Sequence
  Description of Artificial Sequence: Synthetic oligonucleotide
ucacagcaguauuuggcaac

SEQ ID NO: 2130 - RNA, 20 nt, Artificial Sequence
  Description of Artificial Sequence: Synthetic oligonucleotide
cucacagcaguauuuggcaa

SEQ ID NO: 2131 - RNA, 20 nt, Artificial Sequence
  Description of Artificial Sequence: Synthetic oligonucleotide
gcucacagcaguauuuggca

SEQ ID NO: 2132 - RNA, 20 nt, Artificial Sequence
  Description of Artificial Sequence: Synthetic oligonucleotide
ugcucacagcaguauuuggc

SEQ ID NO: 2133 - RNA, 20 nt, Artificial Sequence
  Description of Artificial Sequence: Synthetic oligonucleotide
augcucacagcaguauuugg

SEQ ID NO: 2134 - RNA, 20 nt, Artificial Sequence
  Description of Artificial Sequence: Synthetic oligonucleotide
aaugcucacagcaguauuug

SEQ ID NO: 2135 - RNA, 20 nt, Artificial Sequence
  Description of Artificial Sequence: Synthetic oligonucleotide
aaaugcucacagcaguauuu

SEQ ID NO: 2136 - RNA, 20 nt, Artificial Sequence
  Description of Artificial Sequence: Synthetic oligonucleotide
caaaugcucacagcaguauu

SEQ ID NO: 2137 - RNA, 20 nt, Artificial Sequence
  Description of Artificial Sequence: Synthetic oligonucleotide
acaaaugcucacagcaguau

SEQ ID NO: 2138 - RNA, 20 nt, Artificial Sequence
  Description of Artificial Sequence: Synthetic oligonucleotide
aacaaaugcucacagcagua

SEQ ID NO: 2139 - RNA, 20 nt, Artificial Sequence
  Description of Artificial Sequence: Synthetic oligonucleotide
uaacaaaugcucacagcagu

SEQ ID NO: 2140 - RNA, 20 nt, Artificial Sequence
  Description of Artificial Sequence: Synthetic oligonucleotide
cuaacaaaugcucacagcag

SEQ ID NO: 2141 - RNA, 20 nt, Artificial Sequence
  Description of Artificial Sequence: Synthetic oligonucleotide
ucuaacaaaugcucacagca

SEQ ID NO: 2142 - RNA, 20 nt, Artificial Sequence
  Description of Artificial Sequence: Synthetic oligonucleotide
aucuaacaaaugcucacagc

SEQ ID NO: 2143 - RNA, 20 nt, Artificial Sequence
  Description of Artificial Sequence: Synthetic oligonucleotide
gaucuaacaaaugcucacag

SEQ ID NO: 2144 - RNA, 20 nt, Artificial Sequence
  Description of Artificial Sequence: Synthetic oligonucleotide
ugaucuaacaaaugcucaca

SEQ ID NO: 2145 - RNA, 20 nt, Artificial Sequence
  Description of Artificial Sequence: Synthetic oligonucleotide
gugaucuaacaaaugcucac

SEQ ID NO: 2146 - RNA, 20 nt, Artificial Sequence
  Description of Artificial Sequence: Synthetic oligonucleotide
ugugaucuaacaaaugcuca

SEQ ID NO: 2147 - RNA, 20 nt, Artificial Sequence
  Description of Artificial Sequence: Synthetic oligonucleotide
augugaucuaacaaaugcuc

SEQ ID NO: 2148 - RNA, 20 nt, Artificial Sequence
  Description of Artificial Sequence: Synthetic oligonucleotide
gaugugaucuaacaaaugcu

SEQ ID NO: 2149 - RNA, 20 nt, Artificial Sequence
  Description of Artificial Sequence: Synthetic oligonucleotide
ugaugugaucuaacaaaugc

SEQ ID NO: 2150 - RNA, 20 nt, Artificial Sequence
  Description of Artificial Sequence: Synthetic oligonucleotide
gugaugugaucuaacaaaug

SEQ ID NO: 2151 - RNA, 20 nt, Artificial Sequence
  Description of Artificial Sequence: Synthetic oligonucleotide
ggugaugugaucuaacaaau

SEQ ID NO: 2152 - RNA, 20 nt, Artificial Sequence
  Description of Artificial Sequence: Synthetic oligonucleotide
uggugaugugaucuaacaaa

SEQ ID NO: 2153 - RNA, 20 nt, Artificial Sequence
  Description of Artificial Sequence: Synthetic oligonucleotide
uuggugaugugaucuaacaa

SEQ ID NO: 2154 - RNA, 20 nt, Artificial Sequence
  Description of Artificial Sequence: Synthetic oligonucleotide
auuggugaugugaucuaaca

SEQ ID NO: 2155 - RNA, 20 nt, Artificial Sequence
  Description of Artificial Sequence: Synthetic oligonucleotide
uauuggugaugugaucuaac

SEQ ID NO: 2156 - RNA, 20 nt, Artificial Sequence
  Description of Artificial Sequence: Synthetic oligonucleotide
uuauuggugaugugaucuaa

SEQ ID NO: 2157 - RNA, 20 nt, Artificial Sequence
  Description of Artificial Sequence: Synthetic oligonucleotide
guuauuggugaugugaucua

SEQ ID NO: 2158 - RNA, 20 nt, Artificial Sequence
  Description of Artificial Sequence: Synthetic oligonucleotide
gguuauuggugaugugaucu

SEQ ID NO: 2159 - RNA, 20 nt, Artificial Sequence
  Description of Artificial Sequence: Synthetic oligonucleotide
ugguuauuggugaugugauc

SEQ ID NO: 2160 - RNA, 20 nt, Artificial Sequence
  Description of Artificial Sequence: Synthetic oligonucleotide
cugguuauuggugaugugau

SEQ ID NO: 2161 - RNA, 20 nt, Artificial Sequence
  Description of Artificial Sequence: Synthetic oligonucleotide
ccugguuauuggugauguga

SEQ ID NO: 2162 - RNA, 20 nt, Artificial Sequence
  Description of Artificial Sequence: Synthetic oligonucleotide
uccugguuauuggugaugug

SEQ ID NO: 2163 - RNA, 20 nt, Artificial Sequence
  Description of Artificial Sequence: Synthetic oligonucleotide
auccugguuauuggugaugu

SEQ ID NO: 2164 - RNA, 20 nt, Artificial Sequence
  Description of Artificial Sequence: Synthetic oligonucleotide
aauccugguuauuggugaug

SEQ ID NO: 2165 - RNA, 20 nt, Artificial Sequence
  Description of Artificial Sequence: Synthetic oligonucleotide
aaauccugguuauuggugau

SEQ ID NO: 2166 - RNA, 20 nt, Artificial Sequence
  Description of Artificial Sequence: Synthetic oligonucleotide
aaaauccugguuauugguga

SEQ ID NO: 2167 - RNA, 20 nt, Artificial Sequence
  Description of Artificial Sequence: Synthetic oligonucleotide
uaaaauccugguuauuggug

SEQ ID NO: 2168 - RNA, 20 nt, Artificial Sequence
  Description of Artificial Sequence: Synthetic oligonucleotide
uuaaaauccugguuauuggu

SEQ ID NO: 2169 - RNA, 20 nt, Artificial Sequence
  Description of Artificial Sequence: Synthetic oligonucleotide
uuuaaaauccugguuauugg

SEQ ID NO: 2170 - RNA, 20 nt, Artificial Sequence
  Description of Artificial Sequence: Synthetic oligonucleotide
cuuuaaaauccugguuauug

SEQ ID NO: 2171 - RNA, 20 nt, Artificial Sequence
  Description of Artificial Sequence: Synthetic oligonucleotide
ccuuuaaaauccugguuauu

SEQ ID NO: 2172 - RNA, 20 nt, Artificial Sequence
  Description of Artificial Sequence: Synthetic oligonucleotide
cccuuuaaaauccugguuau

SEQ ID NO: 2173 - RNA, 20 nt, Artificial Sequence
  Description of Artificial Sequence: Synthetic oligonucleotide
acccuuuaaaauccugguua

SEQ ID NO: 2174 - RNA, 20 nt, Artificial Sequence
  Description of Artificial Sequence: Synthetic oligonucleotide
gacccuuuaaaauccugguu

SEQ ID NO: 2175 - RNA, 20 nt, Artificial Sequence
  Description of Artificial Sequence: Synthetic oligonucleotide
agacccuuuaaaauccuggu

SEQ ID NO: 2176 - RNA, 20 nt, Artificial Sequence
  Description of Artificial Sequence: Synthetic oligonucleotide
cagacccuuuaaaauccugg

SEQ ID NO: 2177 - RNA, 20 nt, Artificial Sequence
  Description of Artificial Sequence: Synthetic oligonucleotide
gcagacccuuuaaaauccug

SEQ ID NO: 2178 - RNA, 20 nt, Artificial Sequence
  Description of Artificial Sequence: Synthetic oligonucleotide
ugcagacccuuuaaaauccu

SEQ ID NO: 2179 - RNA, 20 nt, Artificial Sequence
  Description of Artificial Sequence: Synthetic oligonucleotide
cugcagacccuuuaaaaucc

SEQ ID NO: 2180 - RNA, 20 nt, Artificial Sequence
  Description of Artificial Sequence: Synthetic oligonucleotide
ccugcagacccuuuaaaauc

SEQ ID NO: 2181 - RNA, 20 nt, Artificial Sequence
  Description of Artificial Sequence: Synthetic oligonucleotide
uccugcagacccuuuaaaau

SEQ ID NO: 2182 - RNA, 20 nt, Artificial Sequence
  Description of Artificial Sequence: Synthetic oligonucleotide
cuccugcagacccuuuaaaa

SEQ ID NO: 2183 - RNA, 20 nt, Artificial Sequence
  Description of Artificial Sequence: Synthetic oligonucleotide
gcuccugcagacccuuuaaa

SEQ ID NO: 2184 - RNA, 20 nt, Artificial Sequence
  Description of Artificial Sequence: Synthetic oligonucleotide
ugcuccugcagacccuuuaa

SEQ ID NO: 2185 - RNA, 20 nt, Artificial Sequence
  Description of Artificial Sequence: Synthetic oligonucleotide
gugcuccugcagacccuuua

SEQ ID NO: 2186 - RNA, 20 nt, Artificial Sequence
  Description of Artificial Sequence: Synthetic oligonucleotide
ggugcuccugcagacccuuu

SEQ ID NO: 2187 - RNA, 20 nt, Artificial Sequence
  Description of Artificial Sequence: Synthetic oligonucleotide
aggugcuccugcagacccuu

SEQ ID NO: 2188 - RNA, 20 nt, Artificial Sequence
  Description of Artificial Sequence: Synthetic oligonucleotide
aaggugcuccugcagacccu

SEQ ID NO: 2189 - RNA, 20 nt, Artificial Sequence
  Description of Artificial Sequence: Synthetic oligonucleotide
gaaggugcuccugcagaccc

SEQ ID NO: 2190 - RNA, 20 nt, Artificial Sequence
  Description of Artificial Sequence: Synthetic oligonucleotide
agaaggugcuccugcagacc

SEQ ID NO: 2191 - RNA, 20 nt, Artificial Sequence
  Description of Artificial Sequence: Synthetic oligonucleotide
cagaaggugcuccugcagac

SEQ ID NO: 2192 - RNA, 20 nt, Artificial Sequence
  Description of Artificial Sequence: Synthetic oligonucleotide
acagaaggugcuccugcaga

SEQ ID NO: 2193 - RNA, 20 nt, Artificial Sequence
  Description of Artificial Sequence: Synthetic oligonucleotide
cacagaaggugcuccugcag

SEQ ID NO: 2194 - RNA, 20 nt, Artificial Sequence
  Description of Artificial Sequence: Synthetic oligonucleotide
ccacagaaggugcuccugca

SEQ ID NO: 2195 - RNA, 20 nt, Artificial Sequence
  Description of Artificial Sequence: Synthetic oligonucleotide
uccacagaaggugcuccugc

SEQ ID NO: 2196 - RNA, 20 nt, Artificial Sequence
  Description of Artificial Sequence: Synthetic oligonucleotide
uuccacagaaggugcuccug

SEQ ID NO: 2197 - RNA, 20 nt, Artificial Sequence
  Description of Artificial Sequence: Synthetic oligonucleotide
uuuccacagaaggugcuccu

SEQ ID NO: 2198 - RNA, 20 nt, Artificial Sequence
  Description of Artificial Sequence: Synthetic oligonucleotide
uuuuccacagaaggugcucc

SEQ ID NO: 2199 - RNA, 20 nt, Artificial Sequence
  Description of Artificial Sequence: Synthetic oligonucleotide
auuuuccacagaaggugcuc

SEQ ID NO: 2200 - RNA, 20 nt, Artificial Sequence
  Description of Artificial Sequence: Synthetic oligonucleotide
cauuuuccacagaaggugcu

SEQ ID NO: 2201 - RNA, 20 nt, Artificial Sequence
  Description of Artificial Sequence: Synthetic oligonucleotide
acauuuuccacagaaggugc

SEQ ID NO: 2202 - RNA, 20 nt, Artificial Sequence
  Description of Artificial Sequence: Synthetic oligonucleotide
uacauuuuccacagaaggug

SEQ ID NO: 2203 - RNA, 20 nt, Artificial Sequence
  Description of Artificial Sequence: Synthetic oligonucleotide
uuacauuuuccacagaaggu

SEQ ID NO: 2204 - RNA, 20 nt, Artificial Sequence
  Description of Artificial Sequence: Synthetic oligonucleotide
uuuacauuuuccacagaagg

SEQ ID NO: 2205 - RNA, 20 nt, Artificial Sequence
  Description of Artificial Sequence: Synthetic oligonucleotide
cuuuacauuuuccacagaag

SEQ ID NO: 2206 - RNA, 20 nt, Artificial Sequence
  Description of Artificial Sequence: Synthetic oligonucleotide
ucuuuacauuuuccacagaa

SEQ ID NO: 2207 - RNA, 20 nt, Artificial Sequence
  Description of Artificial Sequence: Synthetic oligonucleotide
uucuuuacauuuuccacaga

SEQ ID NO: 2208 - RNA, 20 nt, Artificial Sequence
  Description of Artificial Sequence: Synthetic oligonucleotide
auucuuuacauuuuccacag

SEQ ID NO: 2209 - RNA, 20 nt, Artificial Sequence
  Description of Artificial Sequence: Synthetic oligonucleotide
cauucuuuacauuuuccaca

SEQ ID NO: 2210 - RNA, 20 nt, Artificial Sequence
  Description of Artificial Sequence: Synthetic oligonucleotide
ccauucuuuacauuuuccac

SEQ ID NO: 2211 - RNA, 20 nt, Artificial Sequence
  Description of Artificial Sequence: Synthetic oligonucleotide
uccauucuuuacauuuucca

SEQ ID NO: 2212 - RNA, 20 nt, Artificial Sequence
  Description of Artificial Sequence: Synthetic oligonucleotide
uuccauucuuuacauuuucc

SEQ ID NO: 2213 - RNA, 20 nt, Artificial Sequence
  Description of Artificial Sequence: Synthetic oligonucleotide
auuccauucuuuacauuuuc

SEQ ID NO: 2214 - RNA, 20 nt, Artificial Sequence
  Description of Artificial Sequence: Synthetic oligonucleotide
gauuccauucuuuacauuuu

SEQ ID NO: 2215 - RNA, 20 nt, Artificial Sequence
  Description of Artificial Sequence: Synthetic oligonucleotide
ugauuccauucuuuacauuu

SEQ ID NO: 2216 - RNA, 20 nt, Artificial Sequence
  Description of Artificial Sequence: Synthetic oligonucleotide
cugauuccauucuuuacauu

SEQ ID NO: 2217 - RNA, 20 nt, Artificial Sequence
  Description of Artificial Sequence: Synthetic oligonucleotide
ucugauuccauucuuuacau

SEQ ID NO: 2218 - RNA, 20 nt, Artificial Sequence
  Description of Artificial Sequence: Synthetic oligonucleotide
uucugauuccauucuuuaca

SEQ ID NO: 2219 - RNA, 20 nt, Artificial Sequence
  Description of Artificial Sequence: Synthetic oligonucleotide
guucugauuccauucuuuac

SEQ ID NO: 2220 - RNA, 20 nt, Artificial Sequence
  Description of Artificial Sequence: Synthetic oligonucleotide
uguucugauuccauucuuua

SEQ ID NO: 2221 - RNA, 20 nt, Artificial Sequence
  Description of Artificial Sequence: Synthetic oligonucleotide
cuguucugauuccauucuuu

SEQ ID NO: 2222 - RNA, 20 nt, Artificial Sequence
  Description of Artificial Sequence: Synthetic oligonucleotide
ccuguucugauuccauucuu

SEQ ID NO: 2223 - RNA, 20 nt, Artificial Sequence
  Description of Artificial Sequence: Synthetic oligonucleotide
accuguucugauuccauucu

SEQ ID NO: 2224 - RNA, 20 nt, Artificial Sequence
  Description of Artificial Sequence: Synthetic oligonucleotide
aaccuguucugauuccauuc

SEQ ID NO: 2225 - RNA, 20 nt, Artificial Sequence
  Description of Artificial Sequence: Synthetic oligonucleotide
aaaccuguucugauuccauu

SEQ ID NO: 2226 - RNA, 20 nt, Artificial Sequence
  Description of Artificial Sequence: Synthetic oligonucleotide
aaaaccuguucugauuccau

SEQ ID NO: 2227 - RNA, 20 nt, Artificial Sequence
  Description of Artificial Sequence: Synthetic oligonucleotide
gaaaaccuguucugauucca

SEQ ID NO: 2228 - RNA, 20 nt, Artificial Sequence
  Description of Artificial Sequence: Synthetic oligonucleotide
agaaaaccuguucugauucc

SEQ ID NO: 2229 - RNA, 20 nt, Artificial Sequence
  Description of Artificial Sequence: Synthetic oligonucleotide
cagaaaaccuguucugauuc

SEQ ID NO: 2230 - RNA, 20 nt, Artificial Sequence
  Description of Artificial Sequence: Synthetic oligonucleotide
ccagaaaaccuguucugauu

SEQ ID NO: 2231 - RNA, 20 nt, Artificial Sequence
  Description of Artificial Sequence: Synthetic oligonucleotide
uccagaaaaccuguucugau

SEQ ID NO: 2232 - RNA, 20 nt, Artificial Sequence
  Description of Artificial Sequence: Synthetic oligonucleotide
cuccagaaaaccuguucuga

SEQ ID NO: 2233 - RNA, 20 nt, Artificial Sequence
  Description of Artificial Sequence: Synthetic oligonucleotide
ucuccagaaaaccuguucug

SEQ ID NO: 2234 - RNA, 20 nt, Artificial Sequence
  Description of Artificial Sequence: Synthetic oligonucleotide
aucuccagaaaaccuguucu

SEQ ID NO: 2235 - RNA, 20 nt, Artificial Sequence
  Description of Artificial Sequence: Synthetic oligonucleotide
aaucuccagaaaaccuguuc

SEQ ID NO: 2236 - RNA, 20 nt, Artificial Sequence
  Description of Artificial Sequence: Synthetic oligonucleotide
caaucuccagaaaaccuguu

SEQ ID NO: 2237 - RNA, 20 nt, Artificial Sequence
  Description of Artificial Sequence: Synthetic oligonucleotide
ucaaucuccagaaaaccugu

SEQ ID NO: 2238 - RNA, 20 nt, Artificial Sequence
  Description of Artificial Sequence: Synthetic oligonucleotide
aucaaucuccagaaaaccug

SEQ ID NO: 2239 - RNA, 20 nt, Artificial Sequence
  Description of Artificial Sequence: Synthetic oligonucleotide
caucaaucuccagaaaaccu

SEQ ID NO: 2240 - RNA, 20 nt, Artificial Sequence
  Description of Artificial Sequence: Synthetic oligonucleotide
ucaucaaucuccagaaaacc

SEQ ID NO: 2241 - RNA, 20 nt, Artificial Sequence
  Description of Artificial Sequence: Synthetic oligonucleotide
uucaucaaucuccagaaaac

SEQ ID NO: 2242 - RNA, 20 nt, Artificial Sequence
  Description of Artificial Sequence: Synthetic oligonucleotide
guucaucaaucuccagaaaa

SEQ ID NO: 2243 - RNA, 20 nt, Artificial Sequence
  Description of Artificial Sequence: Synthetic oligonucleotide
uguucaucaaucuccagaaa

SEQ ID NO: 2244 - RNA, 20 nt, Artificial Sequence
  Description of Artificial Sequence: Synthetic oligonucleotide
guguucaucaaucuccagaa

SEQ ID NO: 2245 - RNA, 20 nt, Artificial Sequence
  Description of Artificial Sequence: Synthetic oligonucleotide
uguguucaucaaucuccaga

SEQ ID NO: 2246 - RNA, 20 nt, Artificial Sequence
  Description of Artificial Sequence: Synthetic oligonucleotide
auguguucaucaaucuccag

SEQ ID NO: 2247 - RNA, 20 nt, Artificial Sequence
  Description of Artificial Sequence: Synthetic oligonucleotide
cauguguucaucaaucucca

SEQ ID NO: 2248 - RNA, 20 nt, Artificial Sequence
  Description of Artificial Sequence: Synthetic oligonucleotide
ucauguguucaucaaucucc

SEQ ID NO: 2249 - RNA, 20 nt, Artificial Sequence
  Description of Artificial Sequence: Synthetic oligonucleotide
cucauguguucaucaaucuc

SEQ ID NO: 2250 - RNA, 20 nt, Artificial Sequence
  Description of Artificial Sequence: Synthetic oligonucleotide
ucucauguguucaucaaucu

SEQ ID NO: 2251 - RNA, 20 nt, Artificial Sequence
  Description of Artificial Sequence: Synthetic oligonucleotide
cucucauguguucaucaauc

SEQ ID NO: 2252 - RNA, 20 nt, Artificial Sequence
  Description of Artificial Sequence: Synthetic oligonucleotide
acucucauguguucaucaau

SEQ ID NO: 2253 - RNA, 20 nt, Artificial Sequence
  Description of Artificial Sequence: Synthetic oligonucleotide
aacucucauguguucaucaa

SEQ ID NO: 2254 - RNA, 20 nt, Artificial Sequence
  Description of Artificial Sequence: Synthetic oligonucleotide
uaacucucauguguucauca

SEQ ID NO: 2255 - RNA, 20 nt, Artificial Sequence
  Description of Artificial Sequence: Synthetic oligonucleotide
auaacucucauguguucauc

SEQ ID NO: 2256 - RNA, 20 nt, Artificial Sequence
  Description of Artificial Sequence: Synthetic oligonucleotide
cauaacucucauguguucau

SEQ ID NO: 2257 - RNA, 20 nt, Artificial Sequence
  Description of Artificial Sequence: Synthetic oligonucleotide
acauaacucucauguguuca

SEQ ID NO: 2258 - RNA, 20 nt, Artificial Sequence
  Description of Artificial Sequence: Synthetic oligonucleotide
gacauaacucucauguguuc

SEQ ID NO: 2259 - RNA, 20 nt, Artificial Sequence
  Description of Artificial Sequence: Synthetic oligonucleotide
ugacauaacucucauguguu

SEQ ID NO: 2260 - RNA, 20 nt, Artificial Sequence
  Description of Artificial Sequence: Synthetic oligonucleotide
cugacauaacucucaugugu

SEQ ID NO: 2261 - RNA, 20 nt, Artificial Sequence
  Description of Artificial Sequence: Synthetic oligonucleotide
ucugacauaacucucaugug

SEQ ID NO: 2262 - RNA, 20 nt, Artificial Sequence
  Description of Artificial Sequence: Synthetic oligonucleotide
cucugacauaacucucaugu

SEQ ID NO: 2263 - RNA, 20 nt, Artificial Sequence
  Description of Artificial Sequence: Synthetic oligonucleotide
ucucugacauaacucucaug

SEQ ID NO: 2264 - RNA, 20 nt, Artificial Sequence
  Description of Artificial Sequence: Synthetic oligonucleotide
uucucugacauaacucucau

SEQ ID NO: 2265 - RNA, 20 nt, Artificial Sequence
  Description of Artificial Sequence: Synthetic oligonucleotide
cuucucugacauaacucuca

SEQ ID NO: 2266 - RNA, 20 nt, Artificial Sequence
  Description of Artificial Sequence: Synthetic oligonucleotide
ucuucucugacauaacucuc

SEQ ID NO: 2267 - RNA, 20 nt, Artificial Sequence
  Description of Artificial Sequence: Synthetic oligonucleotide
uucuucucugacauaacucu

SEQ ID NO: 2268 - RNA, 20 nt, Artificial Sequence
  Description of Artificial Sequence: Synthetic oligonucleotide
uuucuucucugacauaacuc

SEQ ID NO: 2269 - RNA, 20 nt, Artificial Sequence
  Description of Artificial Sequence: Synthetic oligonucleotide
guuucuucucugacauaacu

SEQ ID NO: 2270 - RNA, 20 nt, Artificial Sequence
  Description of Artificial Sequence: Synthetic oligonucleotide
uguuucuucucugacauaac

SEQ ID NO: 2271 - RNA, 20 nt, Artificial Sequence
  Description of Artificial Sequence: Synthetic oligonucleotide
auguuucuucucugacauaa

SEQ ID NO: 2272 - RNA, 20 nt, Artificial Sequence
  Description of Artificial Sequence: Synthetic oligonucleotide
cauguuucuucucugacaua

SEQ ID NO: 2273 - RNA, 20 nt, Artificial Sequence
  Description of Artificial Sequence: Synthetic oligonucleotide
ccauguuucuucucugacau

SEQ ID NO: 2274 - RNA, 20 nt, Artificial Sequence
  Description of Artificial Sequence: Synthetic oligonucleotide
accauguuucuucucugaca

SEQ ID NO: 2275 - RNA, 20 nt, Artificial Sequence
  Description of Artificial Sequence: Synthetic oligonucleotide
caccauguuucuucucugac

SEQ ID NO: 2276 - RNA, 20 nt, Artificial Sequence
  Description of Artificial Sequence: Synthetic oligonucleotide
gcaccauguuucuucucuga

SEQ ID NO: 2277 - RNA, 20 nt, Artificial Sequence
  Description of Artificial Sequence: Synthetic oligonucleotide
ugcaccauguuucuucucug

SEQ ID NO: 2278 - RNA, 20 nt, Artificial Sequence
  Description of Artificial Sequence: Synthetic oligonucleotide
cugcaccauguuucuucucu

SEQ ID NO: 2279 - RNA, 20 nt, Artificial Sequence
  Description of Artificial Sequence: Synthetic oligonucleotide
ucugcaccauguuucuucuc

SEQ ID NO: 2280 - RNA, 20 nt, Artificial Sequence
  Description of Artificial Sequence: Synthetic oligonucleotide
aucugcaccauguuucuucu

SEQ ID NO: 2281 - RNA, 20 nt, Artificial Sequence
  Description of Artificial Sequence: Synthetic oligonucleotide
uaucugcaccauguuucuuc

SEQ ID NO: 2282 - RNA, 20 nt, Artificial Sequence
  Description of Artificial Sequence: Synthetic oligonucleotide
cuaucugcaccauguuucuu

SEQ ID NO: 2283 - RNA, 20 nt, Artificial Sequence
  Description of Artificial Sequence: Synthetic oligonucleotide
ucuaucugcaccauguuucu

SEQ ID NO: 2284 - RNA, 20 nt, Artificial Sequence
  Description of Artificial Sequence: Synthetic oligonucleotide
uucuaucugcaccauguuuc

SEQ ID NO: 2285 - RNA, 20 nt, Artificial Sequence
  Description of Artificial Sequence: Synthetic oligonucleotide
cuucuaucugcaccauguuu

SEQ ID NO: 2286 - RNA, 20 nt, Artificial Sequence
  Description of Artificial Sequence: Synthetic oligonucleotide
acuucuaucugcaccauguu

SEQ ID NO: 2287 - RNA, 20 nt, Artificial Sequence
  Description of Artificial Sequence: Synthetic oligonucleotide
cacuucuaucugcaccaugu

SEQ ID NO: 2288 - RNA, 20 nt, Artificial Sequence
  Description of Artificial Sequence: Synthetic oligonucleotide
ccacuucuaucugcaccaug

SEQ ID NO: 2289 - RNA, 20 nt, Artificial Sequence
  Description of Artificial Sequence: Synthetic oligonucleotide
cccacuucuaucugcaccau

SEQ ID NO: 2290 - RNA, 20 nt, Artificial Sequence
  Description of Artificial Sequence: Synthetic oligonucleotide
acccacuucuaucugcacca

SEQ ID NO: 2291 - RNA, 20 nt, Artificial Sequence
  Description of Artificial Sequence: Synthetic oligonucleotide
gacccacuucuaucugcacc

SEQ ID NO: 2292 - RNA, 20 nt, Artificial Sequence
  Description of Artificial Sequence: Synthetic oligonucleotide
ugacccacuucuaucugcac

SEQ ID NO: 2293 - RNA, 20 nt, Artificial Sequence
  Description of Artificial Sequence: Synthetic oligonucleotide
uugacccacuucuaucugca

SEQ ID NO: 2294 - RNA, 20 nt, Artificial Sequence
  Description of Artificial Sequence: Synthetic oligonucleotide
guugacccacuucuaucugc

SEQ ID NO: 2295 - RNA, 20 nt, Artificial Sequence
  Description of Artificial Sequence: Synthetic oligonucleotide
uguugacccacuucuaucug

SEQ ID NO: 2296 - RNA, 20 nt, Artificial Sequence
  Description of Artificial Sequence: Synthetic oligonucleotide
cuguugacccacuucuaucu

SEQ ID NO: 2297 - RNA, 20 nt, Artificial Sequence
  Description of Artificial Sequence: Synthetic oligonucleotide
gcuguugacccacuucuauc

SEQ ID NO: 2298 - RNA, 20 nt, Artificial Sequence
  Description of Artificial Sequence: Synthetic oligonucleotide
agcuguugacccacuucuau

SEQ ID NO: 2299 - RNA, 20 nt, Artificial Sequence
  Description of Artificial Sequence: Synthetic oligonucleotide
cagcuguugacccacuucua

SEQ ID NO: 2300 - RNA, 20 nt, Artificial Sequence
  Description of Artificial Sequence: Synthetic oligonucleotide
acagcuguugacccacuucu

SEQ ID NO: 2301 - RNA, 20 nt, Artificial Sequence
  Description of Artificial Sequence: Synthetic oligonucleotide
uacagcuguugacccacuuc

SEQ ID NO: 2302 - RNA, 20 nt, Artificial Sequence
  Description of Artificial Sequence: Synthetic oligonucleotide
cuacagcuguugacccacuu

SEQ ID NO: 2303 - RNA, 20 nt, Artificial Sequence
  Description of Artificial Sequence: Synthetic oligonucleotide
ccuacagcuguugacccacu

SEQ ID NO: 2304 - RNA, 20 nt, Artificial Sequence
  Description of Artificial Sequence: Synthetic oligonucleotide
accuacagcuguugacccac

SEQ ID NO: 2305 - RNA, 20 nt, Artificial Sequence
  Description of Artificial Sequence: Synthetic oligonucleotide
caccuacagcuguugaccca

SEQ ID NO: 2306 - RNA, 20 nt, Artificial Sequence
  Description of Artificial Sequence: Synthetic oligonucleotide
acaccuacagcuguugaccc

SEQ ID NO: 2307 - RNA, 20 nt, Artificial Sequence
  Description of Artificial Sequence: Synthetic oligonucleotide
gacaccuacagcuguugacc

SEQ ID NO: 2308 - RNA, 20 nt, Artificial Sequence
  Description of Artificial Sequence: Synthetic oligonucleotide
agacaccuacagcuguugac

SEQ ID NO: 2309 - RNA, 20 nt, Artificial Sequence
  Description of Artificial Sequence: Synthetic oligonucleotide
aagacaccuacagcuguuga

SEQ ID NO: 2310 - RNA, 20 nt, Artificial Sequence
  Description of Artificial Sequence: Synthetic oligonucleotide
uaagacaccuacagcuguug

SEQ ID NO: 2311 - RNA, 20 nt, Artificial Sequence
  Description of Artificial Sequence: Synthetic oligonucleotide
uuaagacaccuacagcuguu

SEQ ID NO: 2312 - RNA, 20 nt, Artificial Sequence
  Description of Artificial Sequence: Synthetic oligonucleotide
auuaagacaccuacagcugu

SEQ ID NO: 2313 - RNA, 20 nt, Artificial Sequence
  Description of Artificial Sequence: Synthetic oligonucleotide
aauuaagacaccuacagcug

SEQ ID NO: 2314 - RNA, 20 nt, Artificial Sequence
  Description of Artificial Sequence: Synthetic oligonucleotide
aaauuaagacaccuacagcu

SEQ ID NO: 2315 - RNA, 20 nt, Artificial Sequence
  Description of Artificial Sequence: Synthetic oligonucleotide
gaaauuaagacaccuacagc

SEQ ID NO: 2316 - RNA, 20 nt, Artificial Sequence
  Description of Artificial Sequence: Synthetic oligonucleotide
agaaauuaagacaccuacag

SEQ ID NO: 2317 - RNA, 20 nt, Artificial Sequence
  Description of Artificial Sequence: Synthetic oligonucleotide
gagaaauuaagacaccuaca

SEQ ID NO: 2318 - RNA, 20 nt, Artificial Sequence
  Description of Artificial Sequence: Synthetic oligonucleotide
ggagaaauuaagacaccuac

SEQ ID NO: 2319 - RNA, 20 nt, Artificial Sequence
  Description of Artificial Sequence: Synthetic oligonucleotide
gggagaaauuaagacaccua

SEQ ID NO: 2320 - RNA, 20 nt, Artificial Sequence
  Description of Artificial Sequence: Synthetic oligonucleotide
ggggagaaauuaagacaccu

SEQ ID NO: 2321 - RNA, 20 nt, Artificial Sequence
  Description of Artificial Sequence: Synthetic oligonucleotide
uggggagaaauuaagacacc

SEQ ID NO: 2322 - RNA, 20 nt, Artificial Sequence
  Description of Artificial Sequence: Synthetic oligonucleotide
uuggggagaaauuaagacac

SEQ ID NO: 2323 - RNA, 20 nt, Artificial Sequence
  Description of Artificial Sequence: Synthetic oligonucleotide
guuggggagaaauuaagaca

SEQ ID NO: 2324 - RNA, 20 nt, Artificial Sequence
  Description of Artificial Sequence: Synthetic oligonucleotide
uguuggggagaaauuaagac

SEQ ID NO: 2325 - RNA, 20 nt, Artificial Sequence
  Description of Artificial Sequence: Synthetic oligonucleotide
auguuggggagaaauuaaga

SEQ ID NO: 2326 - RNA, 20 nt, Artificial Sequence
  Description of Artificial Sequence: Synthetic oligonucleotide
uauguuggggagaaauuaag

SEQ ID NO: 2327 - RNA, 20 nt, Artificial Sequence
  Description of Artificial Sequence: Synthetic oligonucleotide
guauguuggggagaaauuaa

SEQ ID NO: 2328 - RNA, 20 nt, Artificial Sequence
  Description of Artificial Sequence: Synthetic oligonucleotide
aguauguuggggagaaauua

SEQ ID NO: 2329 - RNA, 20 nt, Artificial Sequence
  Description of Artificial Sequence: Synthetic oligonucleotide
aaguauguuggggagaaauu

SEQ ID NO: 2330 - RNA, 20 nt, Artificial Sequence
  Description of Artificial Sequence: Synthetic oligonucleotide
uaaguauguuggggagaaau

SEQ ID NO: 2331 - RNA, 20 nt, Artificial Sequence
  Description of Artificial Sequence: Synthetic oligonucleotide
auaaguauguuggggagaaa

SEQ ID NO: 2332 - RNA, 20 nt, Artificial Sequence
  Description of Artificial Sequence: Synthetic oligonucleotide
aauaaguauguuggggagaa

SEQ ID NO: 2333 - RNA, 20 nt, Artificial Sequence
  Description of Artificial Sequence: Synthetic oligonucleotide
aaauaaguauguuggggaga

SEQ ID NO: 2334 - RNA, 20 nt, Artificial Sequence
  Description of Artificial Sequence: Synthetic oligonucleotide
gaaauaaguauguuggggag

SEQ ID NO: 2335 - RNA, 20 nt, Artificial Sequence
  Description of Artificial Sequence: Synthetic oligonucleotide
ugaaauaaguauguugggga

SEQ ID NO: 2336 - RNA, 20 nt, Artificial Sequence
  Description of Artificial Sequence: Synthetic oligonucleotide
augaaauaaguauguugggg

SEQ ID NO: 2337 - RNA, 20 nt, Artificial Sequence
  Description of Artificial Sequence: Synthetic oligonucleotide
aaugaaauaaguauguuggg

SEQ ID NO: 2338 - RNA, 20 nt, Artificial Sequence
  Description of Artificial Sequence: Synthetic oligonucleotide
uaaugaaauaaguauguugg

SEQ ID NO: 2339 - RNA, 20 nt, Artificial Sequence
  Description of Artificial Sequence: Synthetic oligonucleotide
uuaaugaaauaaguauguug

SEQ ID NO: 2340 - RNA, 20 nt, Artificial Sequence
  Description of Artificial Sequence: Synthetic oligonucleotide
guuaaugaaauaaguauguu

SEQ ID NO: 2341 - RNA, 20 nt, Artificial Sequence
  Description of Artificial Sequence: Synthetic oligonucleotide
aguuaaugaaauaaguaugu

SEQ ID NO: 2342 - RNA, 20 nt, Artificial Sequence
  Description of Artificial Sequence: Synthetic oligonucleotide
caguuaaugaaauaaguaug

SEQ ID NO: 2343 - RNA, 20 nt, Artificial Sequence
  Description of Artificial Sequence: Synthetic oligonucleotide
acaguuaaugaaauaaguau

SEQ ID NO: 2344 - RNA, 20 nt, Artificial Sequence
  Description of Artificial Sequence: Synthetic oligonucleotide
cacaguuaaugaaauaagua

SEQ ID NO: 2345 - RNA, 20 nt, Artificial Sequence
  Description of Artificial Sequence: Synthetic oligonucleotide
ccacaguuaaugaaauaagu

SEQ ID NO: 2346 - RNA, 20 nt, Artificial Sequence
  Description of Artificial Sequence: Synthetic oligonucleotide
uccacaguuaaugaaauaag

SEQ ID NO: 2347 - RNA, 20 nt, Artificial Sequence
  Description of Artificial Sequence: Synthetic oligonucleotide
cuccacaguuaaugaaauaa

SEQ ID NO: 2348 - RNA, 20 nt, Artificial Sequence
  Description of Artificial Sequence: Synthetic oligonucleotide
ucuccacaguuaaugaaaua

SEQ ID NO: 2349 - RNA, 20 nt, Artificial Sequence
  Description of Artificial Sequence: Synthetic oligonucleotide
gucuccacaguuaaugaaau

SEQ ID NO: 2350 - RNA, 20 nt, Artificial Sequence
  Description of Artificial Sequence: Synthetic oligonucleotide
agucuccacaguuaaugaaa

SEQ ID NO: 2351 - RNA, 20 nt, Artificial Sequence
  Description of Artificial Sequence: Synthetic oligonucleotide
gagucuccacaguuaaugaa

SEQ ID NO: 2352 - RNA, 20 nt, Artificial Sequence
  Description of Artificial Sequence: Synthetic oligonucleotide
ugagucuccacaguuaauga

SEQ ID NO: 2353 - RNA, 20 nt, Artificial Sequence
  Description of Artificial Sequence: Synthetic oligonucleotide
uugagucuccacaguuaaug

SEQ ID NO: 2354 - RNA, 20 nt, Artificial Sequence
  Description of Artificial Sequence: Synthetic oligonucleotide
cuugagucuccacaguuaau

SEQ ID NO: 2355 - RNA, 20 nt, Artificial Sequence
  Description of Artificial Sequence: Synthetic oligonucleotide
ucuugagucuccacaguuaa

SEQ ID NO: 2356 - RNA, 20 nt, Artificial Sequence
  Description of Artificial Sequence: Synthetic oligonucleotide
cucuugagucuccacaguua

SEQ ID NO: 2357 - RNA, 20 nt, Artificial Sequence
  Description of Artificial Sequence: Synthetic oligonucleotide
ccucuugagucuccacaguu

SEQ ID NO: 2358 - RNA, 20 nt, Artificial Sequence
  Description of Artificial Sequence: Synthetic oligonucleotide
accucuugagucuccacagu

SEQ ID NO: 2359 - RNA, 20 nt, Artificial Sequence
  Description of Artificial Sequence: Synthetic oligonucleotide
aaccucuugagucuccacag

SEQ ID NO: 2360 - RNA, 20 nt, Artificial Sequence
  Description of Artificial Sequence: Synthetic oligonucleotide
aaaccucuugagucuccaca

SEQ ID NO: 2361 - RNA, 20 nt, Artificial Sequence
  Description of Artificial Sequence: Synthetic oligonucleotide
uaaaccucuugagucuccac

SEQ ID NO: 2362 - RNA, 20 nt, Artificial Sequence
  Description of Artificial Sequence: Synthetic oligonucleotide
guaaaccucuugagucucca

SEQ ID NO: 2363 - RNA, 20 nt, Artificial Sequence
  Description of Artificial Sequence: Synthetic oligonucleotide
aguaaaccucuugagucucc

SEQ ID NO: 2364 - RNA, 20 nt, Artificial Sequence
  Description of Artificial Sequence: Synthetic oligonucleotide
aaguaaaccucuugagucuc

SEQ ID NO: 2365 - RNA, 20 nt, Artificial Sequence
  Description of Artificial Sequence: Synthetic oligonucleotide
aaaguaaaccucuugagucu

SEQ ID NO: 2366 - RNA, 20 nt, Artificial Sequence
  Description of Artificial Sequence: Synthetic oligonucleotide
caaaguaaaccucuugaguc

SEQ ID NO: 2367 - RNA, 20 nt, Artificial Sequence
  Description of Artificial Sequence: Synthetic oligonucleotide
acaaaguaaaccucuugagu

SEQ ID NO: 2368 - RNA, 20 nt, Artificial Sequence
  Description of Artificial Sequence: Synthetic oligonucleotide
uacaaaguaaaccucuugag

SEQ ID NO: 2369 - RNA, 20 nt, Artificial Sequence
  Description of Artificial Sequence: Synthetic oligonucleotide
cuacaaaguaaaccucuuga

SEQ ID NO: 2370 - RNA, 20 nt, Artificial Sequence
  Description of Artificial Sequence: Synthetic oligonucleotide
ccuacaaaguaaaccucuug

SEQ ID NO: 2371 - RNA, 20 nt, Artificial Sequence
  Description of Artificial Sequence: Synthetic oligonucleotide
uccuacaaaguaaaccucuu

SEQ ID NO: 2372 - RNA, 20 nt, Artificial Sequence
  Description of Artificial Sequence: Synthetic oligonucleotide
uuccuacaaaguaaaccucu

SEQ ID NO: 2373 - RNA, 20 nt, Artificial Sequence
  Description of Artificial Sequence: Synthetic oligonucleotide
guuccuacaaaguaaaccuc

SEQ ID NO: 2374 - RNA, 20 nt, Artificial Sequence
  Description of Artificial Sequence: Synthetic oligonucleotide
uguuccuacaaaguaaaccu

SEQ ID NO: 2375 - RNA, 20 nt, Artificial Sequence
  Description of Artificial Sequence: Synthetic oligonucleotide
cuguuccuacaaaguaaacc

SEQ ID NO: 2376 - RNA, 20 nt, Artificial Sequence
  Description of Artificial Sequence: Synthetic oligonucleotide
ccuguuccuacaaaguaaac

SEQ ID NO: 2377 - RNA, 20 nt, Artificial Sequence
  Description of Artificial Sequence: Synthetic oligonucleotide
uccuguuccuacaaaguaaa

SEQ ID NO: 2378 - RNA, 20 nt, Artificial Sequence
  Description of Artificial Sequence: Synthetic oligonucleotide
uuccuguuccuacaaaguaa

SEQ ID NO: 2379 - RNA, 20 nt, Artificial Sequence
  Description of Artificial Sequence: Synthetic oligonucleotide
uuuccuguuccuacaaagua

SEQ ID NO: 2380 - RNA, 20 nt, Artificial Sequence
  Description of Artificial Sequence: Synthetic oligonucleotide
cuuuccuguuccuacaaagu

SEQ ID NO: 2381 - RNA, 20 nt, Artificial Sequence
  Description of Artificial Sequence: Synthetic oligonucleotide
acuuuccuguuccuacaaag

SEQ ID NO: 2382 - RNA, 20 nt, Artificial Sequence
  Description of Artificial Sequence: Synthetic oligonucleotide
aacuuuccuguuccuacaaa

SEQ ID NO: 2383 - RNA, 20 nt, Artificial Sequence
  Description of Artificial Sequence: Synthetic oligonucleotide
gaacuuuccuguuccuacaa

SEQ ID NO: 2384 - RNA, 20 nt, Artificial Sequence
  Description of Artificial Sequence: Synthetic oligonucleotide
ugaacuuuccuguuccuaca

SEQ ID NO: 2385 - RNA, 20 nt, Artificial Sequence
  Description of Artificial Sequence: Synthetic oligonucleotide
augaacuuuccuguuccuac

SEQ ID NO: 2386 - RNA, 20 nt, Artificial Sequence
  Description of Artificial Sequence: Synthetic oligonucleotide
aaugaacuuuccuguuccua

SEQ ID NO: 2387 - RNA, 20 nt, Artificial Sequence
  Description of Artificial Sequence: Synthetic oligonucleotide
aaaugaacuuuccuguuccu

SEQ ID NO: 2388 - RNA, 20 nt, Artificial Sequence
  Description of Artificial Sequence: Synthetic oligonucleotide
gaaaugaacuuuccuguucc

SEQ ID NO: 2389 - RNA, 20 nt, Artificial Sequence
  Description of Artificial Sequence: Synthetic oligonucleotide
agaaaugaacuuuccuguuc

SEQ ID NO: 2390 - RNA, 20 nt, Artificial Sequence
  Description of Artificial Sequence: Synthetic oligonucleotide
aagaaaugaacuuuccuguu

SEQ ID NO: 2391 - RNA, 20 nt, Artificial Sequence
  Description of Artificial Sequence: Synthetic oligonucleotide
gaagaaaugaacuuuccugu

SEQ ID NO: 2392 - RNA, 20 nt, Artificial Sequence
  Description of Artificial Sequence: Synthetic oligonucleotide
ugaagaaaugaacuuuccug

SEQ ID NO: 2393 - RNA, 20 nt, Artificial Sequence
  Description of Artificial Sequence: Synthetic oligonucleotide
gugaagaaaugaacuuuccu

SEQ ID NO: 2394 - RNA, 20 nt, Artificial Sequence
  Description of Artificial Sequence: Synthetic oligonucleotide
ugugaagaaaugaacuuucc

SEQ ID NO: 2395 - RNA, 20 nt, Artificial Sequence
  Description of Artificial Sequence: Synthetic oligonucleotide
gugugaagaaaugaacuuuc

SEQ ID NO: 2396 - RNA, 20 nt, Artificial Sequence
  Description of Artificial Sequence: Synthetic oligonucleotide
ugugugaagaaaugaacuuu

SEQ ID NO: 2397 - RNA, 20 nt, Artificial Sequence
  Description of Artificial Sequence: Synthetic oligonucleotide
uugugugaagaaaugaacuu

SEQ ID NO: 2398 - RNA, 20 nt, Artificial Sequence
  Description of Artificial Sequence: Synthetic oligonucleotide
cuugugugaagaaaugaacu

SEQ ID NO: 2399 - RNA, 20 nt, Artificial Sequence
  Description of Artificial Sequence: Synthetic oligonucleotide
ucuugugugaagaaaugaac

SEQ ID NO: 2400 - RNA, 20 nt, Artificial Sequence
  Description of Artificial Sequence: Synthetic oligonucleotide
aucuugugugaagaaaugaa

SEQ ID NO: 2401 - RNA, 20 nt, Artificial Sequence
  Description of Artificial Sequence: Synthetic oligonucleotide
gaucuugugugaagaaauga

SEQ ID NO: 2402 - RNA, 20 nt, Artificial Sequence
  Description of Artificial Sequence: Synthetic oligonucleotide
ugaucuugugugaagaaaug

SEQ ID NO: 2403 - RNA, 20 nt, Artificial Sequence
  Description of Artificial Sequence: Synthetic oligonucleotide
gugaucuugugugaagaaau

SEQ ID NO: 2404 - RNA, 20 nt, Artificial Sequence
  Description of Artificial Sequence: Synthetic oligonucleotide
ugugaucuugugugaagaaa

SEQ ID NO: 2405 - RNA, 20 nt, Artificial Sequence
  Description of Artificial Sequence: Synthetic oligonucleotide
uugugaucuugugugaagaa

SEQ ID NO: 2406 - RNA, 20 nt, Artificial Sequence
  Description of Artificial Sequence: Synthetic oligonucleotide
uuugugaucuugugugaaga

SEQ ID NO: 2407 - RNA, 20 nt, Artificial Sequence
  Description of Artificial Sequence: Synthetic oligonucleotide
guuugugaucuugugugaag

SEQ ID NO: 2408 - RNA, 20 nt, Artificial Sequence
  Description of Artificial Sequence: Synthetic oligonucleotide
gguuugugaucuugugugaa

SEQ ID NO: 2409 - RNA, 20 nt, Artificial Sequence
  Description of Artificial Sequence: Synthetic oligonucleotide
ugguuugugaucuuguguga

SEQ ID NO: 2410 - RNA, 20 nt, Artificial Sequence
  Description of Artificial Sequence: Synthetic oligonucleotide
uugguuugugaucuugugug

SEQ ID NO: 2411 - RNA, 20 nt, Artificial Sequence
  Description of Artificial Sequence: Synthetic oligonucleotide
cuugguuugugaucuugugu

SEQ ID NO: 2412 - RNA, 20 nt, Artificial Sequence
  Description of Artificial Sequence: Synthetic oligonucleotide
acuugguuugugaucuugug

SEQ ID NO: 2413 - RNA, 20 nt, Artificial Sequence
  Description of Artificial Sequence: Synthetic oligonucleotide
uacuugguuugugaucuugu

SEQ ID NO: 2414 - RNA, 20 nt, Artificial Sequence
  Description of Artificial Sequence: Synthetic oligonucleotide
uuacuugguuugugaucuug

SEQ ID NO: 2415 - RNA, 20 nt, Artificial Sequence
  Description of Artificial Sequence: Synthetic oligonucleotide
auuacuugguuugugaucuu

SEQ ID NO: 2416 - RNA, 20 nt, Artificial Sequence
  Description of Artificial Sequence: Synthetic oligonucleotide
gauuacuugguuugugaucu

SEQ ID NO: 2417 - RNA, 20 nt, Artificial Sequence
  Description of Artificial Sequence: Synthetic oligonucleotide
ggauuacuugguuugugauc

SEQ ID NO: 2418 - RNA, 20 nt, Artificial Sequence
  Description of Artificial Sequence: Synthetic oligonucleotide
cggauuacuugguuugugau

SEQ ID NO: 2419 - RNA, 20 nt, Artificial Sequence
  Description of Artificial Sequence: Synthetic oligonucleotide
gcggauuacuugguuuguga

SEQ ID NO: 2420 - RNA, 20 nt, Artificial Sequence
  Description of Artificial Sequence: Synthetic oligonucleotide
agcggauuacuugguuugug

SEQ ID NO: 2421 - RNA, 20 nt, Artificial Sequence
  Description of Artificial Sequence: Synthetic oligonucleotide
cagcggauuacuugguuugu

SEQ ID NO: 2422 - RNA, 20 nt, Artificial Sequence
  Description of Artificial Sequence: Synthetic oligonucleotide
ccagcggauuacuugguuug

SEQ ID NO: 2423 - RNA, 20 nt, Artificial Sequence
  Description of Artificial Sequence: Synthetic oligonucleotide
uccagcggauuacuugguuu

SEQ ID NO: 2424 - RNA, 20 nt, Artificial Sequence
  Description of Artificial Sequence: Synthetic oligonucleotide
cuccagcggauuacuugguu

SEQ ID NO: 2425 - RNA, 20 nt, Artificial Sequence
  Description of Artificial Sequence: Synthetic oligonucleotide
ucuccagcggauuacuuggu

SEQ ID NO: 2426 - RNA, 20 nt, Artificial Sequence
  Description of Artificial Sequence: Synthetic oligonucleotide
uucuccagcggauuacuugg

SEQ ID NO: 2427 - RNA, 20 nt, Artificial Sequence
  Description of Artificial Sequence: Synthetic oligonucleotide
uuucuccagcggauuacuug

SEQ ID NO: 2428 - RNA, 20 nt, Artificial Sequence
  Description of Artificial Sequence: Synthetic oligonucleotide
cuuucuccagcggauuacuu

SEQ ID NO: 2429 - RNA, 20 nt, Artificial Sequence
  Description of Artificial Sequence: Synthetic oligonucleotide
ucuuucuccagcggauuacu

SEQ ID NO: 2430 - RNA, 20 nt, Artificial Sequence
  Description of Artificial Sequence: Synthetic oligonucleotide
uucuuucuccagcggauuac

SEQ ID NO: 2431 - RNA, 20 nt, Artificial Sequence
  Description of Artificial Sequence: Synthetic oligonucleotide
guucuuucuccagcggauua

SEQ ID NO: 2432 - RNA, 20 nt, Artificial Sequence
  Description of Artificial Sequence: Synthetic oligonucleotide
cguucuuucuccagcggauu

SEQ ID NO: 2433 - RNA, 20 nt, Artificial Sequence
  Description of Artificial Sequence: Synthetic oligonucleotide
ucguucuuucuccagcggau

SEQ ID NO: 2434 - RNA, 20 nt, Artificial Sequence
  Description of Artificial Sequence: Synthetic oligonucleotide
uucguucuuucuccagcgga

SEQ ID NO: 2435 - RNA, 20 nt, Artificial Sequence
  Description of Artificial Sequence: Synthetic oligonucleotide
auucguucuuucuccagcgg

SEQ ID NO: 2436 - RNA, 20 nt, Artificial Sequence
  Description of Artificial Sequence: Synthetic oligonucleotide
aauucguucuuucuccagcg

SEQ ID NO: 2437 - RNA, 20 nt, Artificial Sequence
  Description of Artificial Sequence: Synthetic oligonucleotide
gaauucguucuuucuccagc

SEQ ID NO: 2438 - RNA, 20 nt, Artificial Sequence
  Description of Artificial Sequence: Synthetic oligonucleotide
ugaauucguucuuucuccag

SEQ ID NO: 2439 - RNA, 20 nt, Artificial Sequence
  Description of Artificial Sequence: Synthetic oligonucleotide
cugaauucguucuuucucca

SEQ ID NO: 2440 - RNA, 20 nt, Artificial Sequence
  Description of Artificial Sequence: Synthetic oligonucleotide
ucugaauucguucuuucucc

SEQ ID NO: 2441 - RNA, 20 nt, Artificial Sequence
  Description of Artificial Sequence: Synthetic oligonucleotide
uucugaauucguucuuucuc

SEQ ID NO: 2442 - RNA, 20 nt, Artificial Sequence
  Description of Artificial Sequence: Synthetic oligonucleotide
auucugaauucguucuuucu

SEQ ID NO: 2443 - RNA, 20 nt, Artificial Sequence
  Description of Artificial Sequence: Synthetic oligonucleotide
cauucugaauucguucuuuc

SEQ ID NO: 2444 - RNA, 20 nt, Artificial Sequence
  Description of Artificial Sequence: Synthetic oligonucleotide
gcauucugaauucguucuuu

SEQ ID NO: 2445 - RNA, 20 nt, Artificial Sequence
  Description of Artificial Sequence: Synthetic oligonucleotide
ugcauucugaauucguucuu

SEQ ID NO: 2446 - RNA, 20 nt, Artificial Sequence
  Description of Artificial Sequence: Synthetic oligonucleotide
cugcauucugaauucguucu

SEQ ID NO: 2447 - RNA, 20 nt, Artificial Sequence
  Description of Artificial Sequence: Synthetic oligonucleotide
ccugcauucugaauucguuc

SEQ ID NO: 2448 - RNA, 20 nt, Artificial Sequence
  Description of Artificial Sequence: Synthetic oligonucleotide
accugcauucugaauucguu

SEQ ID NO: 2449 - RNA, 20 nt, Artificial Sequence
  Description of Artificial Sequence: Synthetic oligonucleotide
caccugcauucugaauucgu

SEQ ID NO: 2450 - RNA, 20 nt, Artificial Sequence
  Description of Artificial Sequence: Synthetic oligonucleotide
ccaccugcauucugaauucg

SEQ ID NO: 2451 - RNA, 20 nt, Artificial Sequence
  Description of Artificial Sequence: Synthetic oligonucleotide
gccaccugcauucugaauuc

SEQ ID NO: 2452 - RNA, 20 nt, Artificial Sequence
  Description of Artificial Sequence: Synthetic oligonucleotide
agccaccugcauucugaauu

SEQ ID NO: 2453 - RNA, 20 nt, Artificial Sequence
  Description of Artificial Sequence: Synthetic oligonucleotide
gagccaccugcauucugaau

SEQ ID NO: 2454 - RNA, 20 nt, Artificial Sequence
  Description of Artificial Sequence: Synthetic oligonucleotide
agagccaccugcauucugaa

SEQ ID NO: 2455 - RNA, 20 nt, Artificial Sequence
  Description of Artificial Sequence: Synthetic oligonucleotide
cagagccaccugcauucuga

SEQ ID NO: 2456 - RNA, 20 nt, Artificial Sequence
  Description of Artificial Sequence: Synthetic oligonucleotide
acagagccaccugcauucug

SEQ ID NO: 2457 - RNA, 20 nt, Artificial Sequence
  Description of Artificial Sequence: Synthetic oligonucleotide
uacagagccaccugcauucu

SEQ ID NO: 2458 - RNA, 20 nt, Artificial Sequence
  Description of Artificial Sequence: Synthetic oligonucleotide
uuacagagccaccugcauuc

SEQ ID NO: 2459 - RNA, 20 nt, Artificial Sequence
  Description of Artificial Sequence: Synthetic oligonucleotide
auuacagagccaccugcauu

SEQ ID NO: 2460 - RNA, 20 nt, Artificial Sequence
  Description of Artificial Sequence: Synthetic oligonucleotide
cauuacagagccaccugcau

SEQ ID NO: 2461 - RNA, 20 nt, Artificial Sequence
  Description of Artificial Sequence: Synthetic oligonucleotide
ucauuacagagccaccugca

SEQ ID NO: 2462 - RNA, 20 nt, Artificial Sequence
  Description of Artificial Sequence: Synthetic oligonucleotide
aucauuacagagccaccugc

SEQ ID NO: 2463 - RNA, 20 nt, Artificial Sequence
  Description of Artificial Sequence: Synthetic oligonucleotide
aaucauuacagagccaccug

SEQ ID NO: 2464 - RNA, 20 nt, Artificial Sequence
  Description of Artificial Sequence: Synthetic oligonucleotide
gaaucauuacagagccaccu

SEQ ID NO: 2465 - RNA, 20 nt, Artificial Sequence
  Description of Artificial Sequence: Synthetic oligonucleotide
ugaaucauuacagagccacc

SEQ ID NO: 2466 - RNA, 20 nt, Artificial Sequence
  Description of Artificial Sequence: Synthetic oligonucleotide
cugaaucauuacagagccac

SEQ ID NO: 2467 - RNA, 20 nt, Artificial Sequence
  Description of Artificial Sequence: Synthetic oligonucleotide
gcugaaucauuacagagcca

SEQ ID NO: 2468 - RNA, 20 nt, Artificial Sequence
  Description of Artificial Sequence: Synthetic oligonucleotide
cgcugaaucauuacagagcc

SEQ ID NO: 2469 - RNA, 20 nt, Artificial Sequence
  Description of Artificial Sequence: Synthetic oligonucleotide
acgcugaaucauuacagagc

SEQ ID NO: 2470 - RNA, 20 nt, Artificial Sequence
  Description of Artificial Sequence: Synthetic oligonucleotide
cacgcugaaucauuacagag

SEQ ID NO: 2471 - RNA, 20 nt, Artificial Sequence
  Description of Artificial Sequence: Synthetic oligonucleotide
acacgcugaaucauuacaga

SEQ ID NO: 2472 - RNA, 20 nt, Artificial Sequence
  Description of Artificial Sequence: Synthetic oligonucleotide
cacacgcugaaucauuacag

SEQ ID NO: 2473 - RNA, 20 nt, Artificial Sequence
  Description of Artificial Sequence: Synthetic oligonucleotide
ucacacgcugaaucauuaca

SEQ ID NO: 2474 - RNA, 20 nt, Artificial Sequence
  Description of Artificial Sequence: Synthetic oligonucleotide
uucacacgcugaaucauuac

SEQ ID NO: 2475 - RNA, 20 nt, Artificial Sequence
  Description of Artificial Sequence: Synthetic oligonucleotide
auucacacgcugaaucauua

SEQ ID NO: 2476 - RNA, 20 nt, Artificial Sequence
  Description of Artificial Sequence: Synthetic oligonucleotide
cauucacacgcugaaucauu

SEQ ID NO: 2477 - RNA, 20 nt, Artificial Sequence
  Description of Artificial Sequence: Synthetic oligonucleotide
ccauucacacgcugaaucau

SEQ ID NO: 2478 - RNA, 20 nt, Artificial Sequence
  Description of Artificial Sequence: Synthetic oligonucleotide
gccauucacacgcugaauca

SEQ ID NO: 2479 - RNA, 20 nt, Artificial Sequence
  Description of Artificial Sequence: Synthetic oligonucleotide
agccauucacacgcugaauc

SEQ ID NO: 2480 - RNA, 20 nt, Artificial Sequence
  Description of Artificial Sequence: Synthetic oligonucleotide
gagccauucacacgcugaau

SEQ ID NO: 2481 - RNA, 20 nt, Artificial Sequence
  Description of Artificial Sequence: Synthetic oligonucleotide
agagccauucacacgcugaa

SEQ ID NO: 2482 - RNA, 20 nt, Artificial Sequence
  Description of Artificial Sequence: Synthetic oligonucleotide
gagagccauucacacgcuga

SEQ ID NO: 2483 - RNA, 20 nt, Artificial Sequence
  Description of Artificial Sequence: Synthetic oligonucleotide
agagagccauucacacgcug

SEQ ID NO: 2484 - RNA, 20 nt, Artificial Sequence
  Description of Artificial Sequence: Synthetic oligonucleotide
cagagagccauucacacgcu

SEQ ID NO: 2485 - RNA, 20 nt, Artificial Sequence
  Description of Artificial Sequence: Synthetic oligonucleotide
ccagagagccauucacacgc

SEQ ID NO: 2486 - RNA, 20 nt, Artificial Sequence
  Description of Artificial Sequence: Synthetic oligonucleotide
gccagagagccauucacacg

SEQ ID NO: 2487 - RNA, 20 nt, Artificial Sequence
  Description of Artificial Sequence: Synthetic oligonucleotide
agccagagagccauucacac

SEQ ID NO: 2488 - RNA, 20 nt, Artificial Sequence
  Description of Artificial Sequence: Synthetic oligonucleotide
cagccagagagccauucaca

SEQ ID NO: 2489 - RNA, 20 nt, Artificial Sequence
  Description of Artificial Sequence: Synthetic oligonucleotide
acagccagagagccauucac

SEQ ID NO: 2490 - RNA, 20 nt, Artificial Sequence
  Description of Artificial Sequence: Synthetic oligonucleotide
uacagccagagagccauuca

SEQ ID NO: 2491 - RNA, 20 nt, Artificial Sequence
  Description of Artificial Sequence: Synthetic oligonucleotide
auacagccagagagccauuc

SEQ ID NO: 2492 - RNA, 20 nt, Artificial Sequence
  Description of Artificial Sequence: Synthetic oligonucleotide
gauacagccagagagccauu

SEQ ID NO: 2493 - RNA, 20 nt, Artificial Sequence
  Description of Artificial Sequence: Synthetic oligonucleotide
cgauacagccagagagccau

SEQ ID NO: 2494 - RNA, 20 nt, Artificial Sequence
  Description of Artificial Sequence: Synthetic oligonucleotide
ucgauacagccagagagcca

SEQ ID NO: 2495 - RNA, 20 nt, Artificial Sequence
  Description of Artificial Sequence: Synthetic oligonucleotide
cucgauacagccagagagcc

SEQ ID NO: 2496 - RNA, 20 nt, Artificial Sequence
  Description of Artificial Sequence: Synthetic oligonucleotide
ccucgauacagccagagagc

SEQ ID NO: 2497 - RNA, 20 nt, Artificial Sequence
  Description of Artificial Sequence: Synthetic oligonucleotide
cccucgauacagccagagag

SEQ ID NO: 2498 - RNA, 20 nt, Artificial Sequence
  Description of Artificial Sequence: Synthetic oligonucleotide
gcccucgauacagccagaga

SEQ ID NO: 2499 - RNA, 20 nt, Artificial Sequence
  Description of Artificial Sequence: Synthetic oligonucleotide
ggcccucgauacagccagag

SEQ ID NO: 2500 - RNA, 20 nt, Artificial Sequence
  Description of Artificial Sequence: Synthetic oligonucleotide
gggcccucgauacagccaga

SEQ ID NO: 2501 - RNA, 20 nt, Artificial Sequence
  Description of Artificial Sequence: Synthetic oligonucleotide
agggcccucgauacagccag

SEQ ID NO: 2502 - RNA, 20 nt, Artificial Sequence
  Description of Artificial Sequence: Synthetic oligonucleotide
aagggcccucgauacagcca

SEQ ID NO: 2503 - RNA, 20 nt, Artificial Sequence
  Description of Artificial Sequence: Synthetic oligonucleotide
caagggcccucgauacagcc

SEQ ID NO: 2504 - RNA, 20 nt, Artificial Sequence
  Description of Artificial Sequence: Synthetic oligonucleotide
ccaagggcccucgauacagc

SEQ ID NO: 2505 - RNA, 20 nt, Artificial Sequence
  Description of Artificial Sequence: Synthetic oligonucleotide
cccaagggcccucgauacag

SEQ ID NO: 2506 - RNA, 20 nt, Artificial Sequence
  Description of Artificial Sequence: Synthetic oligonucleotide
ccccaagggcccucgauaca

SEQ ID NO: 2507 - RNA, 20 nt, Artificial Sequence
  Description of Artificial Sequence: Synthetic oligonucleotide
uccccaagggcccucgauac

SEQ ID NO: 2508 - RNA, 20 nt, Artificial Sequence
  Description of Artificial Sequence: Synthetic oligonucleotide
auccccaagggcccucgaua

SEQ ID NO: 2509 - RNA, 20 nt, Artificial Sequence
  Description of Artificial Sequence: Synthetic oligonucleotide
aauccccaagggcccucgau

SEQ ID NO: 2510 - RNA, 20 nt, Artificial Sequence
  Description of Artificial Sequence: Synthetic oligonucleotide
aaauccccaagggcccucga

SEQ ID NO: 2511 - RNA, 20 nt, Artificial Sequence
  Description of Artificial Sequence: Synthetic oligonucleotide
aaaauccccaagggcccucg

SEQ ID NO: 2512 - RNA, 20 nt, Artificial Sequence
  Description of Artificial Sequence: Synthetic oligonucleotide
caaaauccccaagggcccuc

SEQ ID NO: 2513 - RNA, 20 nt, Artificial Sequence
  Description of Artificial Sequence: Synthetic oligonucleotide
ucaaaauccccaagggcccu

SEQ ID NO: 2514 - RNA, 20 nt, Artificial Sequence
  Description of Artificial Sequence: Synthetic oligonucleotide
aucaaaauccccaagggccc

SEQ ID NO: 2515 - RNA, 20 nt, Artificial Sequence
  Description of Artificial Sequence: Synthetic oligonucleotide
aaucaaaauccccaagggcc

SEQ ID NO: 2516 - RNA, 20 nt, Artificial Sequence
  Description of Artificial Sequence: Synthetic oligonucleotide
uaaucaaaauccccaagggc

SEQ ID NO: 2517 - RNA, 20 nt, Artificial Sequence
  Description of Artificial Sequence: Synthetic oligonucleotide
guaaucaaaauccccaaggg

SEQ ID NO: 2518 - RNA, 20 nt, Artificial Sequence
  Description of Artificial Sequence: Synthetic oligonucleotide
uguaaucaaaauccccaagg

SEQ ID NO: 2519 - RNA, 20 nt, Artificial Sequence
  Description of Artificial Sequence: Synthetic oligonucleotide
uuguaaucaaaauccccaag

SEQ ID NO: 2520 - RNA, 20 nt, Artificial Sequence
  Description of Artificial Sequence: Synthetic oligonucleotide
uuuguaaucaaaauccccaa

SEQ ID NO: 2521 - RNA, 20 nt, Artificial Sequence
  Description of Artificial Sequence: Synthetic oligonucleotide
auuuguaaucaaaaucccca

SEQ ID NO: 2522 - RNA, 20 nt, Artificial Sequence
  Description of Artificial Sequence: Synthetic oligonucleotide
cauuuguaaucaaaaucccc

SEQ ID NO: 2523 - RNA, 20 nt, Artificial Sequence
  Description of Artificial Sequence: Synthetic oligonucleotide
acauuuguaaucaaaauccc

SEQ ID NO: 2524 - RNA, 20 nt, Artificial Sequence
  Description of Artificial Sequence: Synthetic oligonucleotide
cacauuuguaaucaaaaucc

SEQ ID NO: 2525 - RNA, 20 nt, Artificial Sequence
  Description of Artificial Sequence: Synthetic oligonucleotide
acacauuuguaaucaaaauc

SEQ ID NO: 2526 - RNA, 20 nt, Artificial Sequence
  Description of Artificial Sequence: Synthetic oligonucleotide
gacacauuuguaaucaaaau

SEQ ID NO: 2527 - RNA, 20 nt, Artificial Sequence
  Description of Artificial Sequence: Synthetic oligonucleotide
ggacacauuuguaaucaaaa

SEQ ID NO: 2528 - RNA, 20 nt, Artificial Sequence
  Description of Artificial Sequence: Synthetic oligonucleotide
uggacacauuuguaaucaaa

SEQ ID NO: 2529 - RNA, 20 nt, Artificial Sequence
  Description of Artificial Sequence: Synthetic oligonucleotide
auggacacauuuguaaucaa

SEQ ID NO: 2530 - RNA, 20 nt, Artificial Sequence
  Description of Artificial Sequence: Synthetic oligonucleotide
cauggacacauuuguaauca

SEQ ID NO: 2531 - RNA, 20 nt, Artificial Sequence
  Description of Artificial Sequence: Synthetic oligonucleotide
ccauggacacauuuguaauc

SEQ ID NO: 2532 - RNA, 20 nt, Artificial Sequence
  Description of Artificial Sequence: Synthetic oligonucleotide
uccauggacacauuuguaau

SEQ ID NO: 2533 - RNA, 20 nt, Artificial Sequence
  Description of Artificial Sequence: Synthetic oligonucleotide
uuccauggacacauuuguaa

SEQ ID NO: 2534 - RNA, 20 nt, Artificial Sequence
  Description of Artificial Sequence: Synthetic oligonucleotide
uuuccauggacacauuugua

SEQ ID NO: 2535 - RNA, 20 nt, Artificial Sequence
  Description of Artificial Sequence: Synthetic oligonucleotide
uuuuccauggacacauuugu

SEQ ID NO: 2536 - RNA, 20 nt, Artificial Sequence
  Description of Artificial Sequence: Synthetic oligonucleotide
cuuuuccauggacacauuug

SEQ ID NO: 2537 - RNA, 20 nt, Artificial Sequence
  Description of Artificial Sequence: Synthetic oligonucleotide
ccuuuuccauggacacauuu

SEQ ID NO: 2538 - RNA, 20 nt, Artificial Sequence
  Description of Artificial Sequence: Synthetic oligonucleotide
accuuuuccauggacacauu

SEQ ID NO: 2539 - RNA, 20 nt, Artificial Sequence
  Description of Artificial Sequence: Synthetic oligonucleotide
gaccuuuuccauggacacau

SEQ ID NO: 2540 - RNA, 20 nt, Artificial Sequence
  Description of Artificial Sequence: Synthetic oligonucleotide
ggaccuuuuccauggacaca

SEQ ID NO: 2541 - RNA, 20 nt, Artificial Sequence
  Description of Artificial Sequence: Synthetic oligonucleotide
aggaccuuuuccauggacac

SEQ ID NO: 2542 - RNA, 20 nt, Artificial Sequence
  Description of Artificial Sequence: Synthetic oligonucleotide
uaggaccuuuuccauggaca

SEQ ID NO: 2543 - RNA, 20 nt, Artificial Sequence
  Description of Artificial Sequence: Synthetic oligonucleotide
guaggaccuuuuccauggac

SEQ ID NO: 2544 - RNA, 20 nt, Artificial Sequence
  Description of Artificial Sequence: Synthetic oligonucleotide
aguaggaccuuuuccaugga

SEQ ID NO: 2545 - RNA, 20 nt, Artificial Sequence
  Description of Artificial Sequence: Synthetic oligonucleotide
caguaggaccuuuuccaugg

SEQ ID NO: 2546 - RNA, 20 nt, Artificial Sequence
  Description of Artificial Sequence: Synthetic oligonucleotide
ucaguaggaccuuuuccaug

SEQ ID NO: 2547 - RNA, 20 nt, Artificial Sequence
  Description of Artificial Sequence: Synthetic oligonucleotide
cucaguaggaccuuuuccau

SEQ ID NO: 2548 - RNA, 20 nt, Artificial Sequence
  Description of Artificial Sequence: Synthetic oligonucleotide
gcucaguaggaccuuuucca

SEQ ID NO: 2549 - RNA, 20 nt, Artificial Sequence
  Description of Artificial Sequence: Synthetic oligonucleotide
ugcucaguaggaccuuuucc

SEQ ID NO: 2550 - RNA, 20 nt, Artificial Sequence
  Description of Artificial Sequence: Synthetic oligonucleotide
cugcucaguaggaccuuuuc

SEQ ID NO: 2551 - RNA, 20 nt, Artificial Sequence
  Description of Artificial Sequence: Synthetic oligonucleotide
gcugcucaguaggaccuuuu

SEQ ID NO: 2552 - RNA, 20 nt, Artificial Sequence
  Description of Artificial Sequence: Synthetic oligonucleotide
agcugcucaguaggaccuuu

SEQ ID NO: 2553 - RNA, 20 nt, Artificial Sequence
  Description of Artificial Sequence: Synthetic oligonucleotide
aagcugcucaguaggaccuu

SEQ ID NO: 2554 - RNA, 20 nt, Artificial Sequence
  Description of Artificial Sequence: Synthetic oligonucleotide
caagcugcucaguaggaccu

SEQ ID NO: 2555 - RNA, 20 nt, Artificial Sequence
  Description of Artificial Sequence: Synthetic oligonucleotide
acaagcugcucaguaggacc

SEQ ID NO: 2556 - RNA, 20 nt, Artificial Sequence
  Description of Artificial Sequence: Synthetic oligonucleotide
gacaagcugcucaguaggac

SEQ ID NO: 2557 - RNA, 20 nt, Artificial Sequence
  Description of Artificial Sequence: Synthetic oligonucleotide
agacaagcugcucaguagga

SEQ ID NO: 2558 - RNA, 20 nt, Artificial Sequence
  Description of Artificial Sequence: Synthetic oligonucleotide
gagacaagcugcucaguagg

SEQ ID NO: 2559 - RNA, 20 nt, Artificial Sequence
  Description of Artificial Sequence: Synthetic oligonucleotide
ugagacaagcugcucaguag

SEQ ID NO: 2560 - RNA, 20 nt, Artificial Sequence
  Description of Artificial Sequence: Synthetic oligonucleotide
gugagacaagcugcucagua

SEQ ID NO: 2561 - RNA, 20 nt, Artificial Sequence
  Description of Artificial Sequence: Synthetic oligonucleotide
ggugagacaagcugcucagu

SEQ ID NO: 2562 - RNA, 20 nt, Artificial Sequence
  Description of Artificial Sequence: Synthetic oligonucleotide
uggugagacaagcugcucag

SEQ ID NO: 2563 - RNA, 20 nt, Artificial Sequence
  Description of Artificial Sequence: Synthetic oligonucleotide
cuggugagacaagcugcuca

SEQ ID NO: 2564 - RNA, 20 nt, Artificial Sequence
  Description of Artificial Sequence: Synthetic oligonucleotide
ucuggugagacaagcugcuc

SEQ ID NO: 2565 - RNA, 20 nt, Artificial Sequence
  Description of Artificial Sequence: Synthetic oligonucleotide
cucuggugagacaagcugcu

SEQ ID NO: 2566 - RNA, 20 nt, Artificial Sequence
  Description of Artificial Sequence: Synthetic oligonucleotide
gcucuggugagacaagcugc

SEQ ID NO: 2567 - RNA, 20 nt, Artificial Sequence
  Description of Artificial Sequence: Synthetic oligonucleotide
ggcucuggugagacaagcug

SEQ ID NO: 2568 - RNA, 20 nt, Artificial Sequence
  Description of Artificial Sequence: Synthetic oligonucleotide
aggcucuggugagacaagcu

SEQ ID NO: 2569 - RNA, 20 nt, Artificial Sequence
  Description of Artificial Sequence: Synthetic oligonucleotide
caggcucuggugagacaagc

SEQ ID NO: 2570 - RNA, 20 nt, Artificial Sequence
  Description of Artificial Sequence: Synthetic oligonucleotide
ucaggcucuggugagacaag

SEQ ID NO: 2571 - RNA, 20 nt, Artificial Sequence
  Description of Artificial Sequence: Synthetic oligonucleotide
uucaggcucuggugagacaa

SEQ ID NO: 2572 - RNA, 20 nt, Artificial Sequence
  Description of Artificial Sequence: Synthetic oligonucleotide
cuucaggcucuggugagaca

SEQ ID NO: 2573 - RNA, 20 nt, Artificial Sequence
  Description of Artificial Sequence: Synthetic oligonucleotide
acuucaggcucuggugagac

SEQ ID NO: 2574 - RNA, 20 nt, Artificial Sequence
  Description of Artificial Sequence: Synthetic oligonucleotide
gacuucaggcucuggugaga

SEQ ID NO: 2575 - RNA, 20 nt, Artificial Sequence
  Description of Artificial Sequence: Synthetic oligonucleotide
ggacuucaggcucuggugag

SEQ ID NO: 2576 - RNA, 20 nt, Artificial Sequence
  Description of Artificial Sequence: Synthetic oligonucleotide
uggacuucaggcucugguga

SEQ ID NO: 2577 - RNA, 20 nt, Artificial Sequence
  Description of Artificial Sequence: Synthetic oligonucleotide
auggacuucaggcucuggug

SEQ ID NO: 2578 - RNA, 20 nt, Artificial Sequence
  Description of Artificial Sequence: Synthetic oligonucleotide
cauggacuucaggcucuggu

SEQ ID NO: 2579 - RNA, 20 nt, Artificial Sequence
  Description of Artificial Sequence: Synthetic oligonucleotide
ucauggacuucaggcucugg

SEQ ID NO: 2580 - RNA, 20 nt, Artificial Sequence
  Description of Artificial Sequence: Synthetic oligonucleotide
aucauggacuucaggcucug

SEQ ID NO: 2581 - RNA, 20 nt, Artificial Sequence
  Description of Artificial Sequence: Synthetic oligonucleotide
uaucauggacuucaggcucu

SEQ ID NO: 2582 - RNA, 20 nt, Artificial Sequence
  Description of Artificial Sequence: Synthetic oligonucleotide
auaucauggacuucaggcuc

SEQ ID NO: 2583 - RNA, 20 nt, Artificial Sequence
  Description of Artificial Sequence: Synthetic oligonucleotide
aauaucauggacuucaggcu

SEQ ID NO: 2584 - RNA, 20 nt, Artificial Sequence
  Description of Artificial Sequence: Synthetic oligonucleotide
caauaucauggacuucaggc

SEQ ID NO: 2585 - RNA, 20 nt, Artificial Sequence
  Description of Artificial Sequence: Synthetic oligonucleotide
ucaauaucauggacuucagg

SEQ ID NO: 2586 - RNA, 20 nt, Artificial Sequence
  Description of Artificial Sequence: Synthetic oligonucleotide
uucaauaucauggacuucag

SEQ ID NO: 2587 - RNA, 20 nt, Artificial Sequence
  Description of Artificial Sequence: Synthetic oligonucleotide
uuucaauaucauggacuuca

SEQ ID NO: 2588 - RNA, 20 nt, Artificial Sequence
  Description of Artificial Sequence: Synthetic oligonucleotide
cuuucaauaucauggacuuc

SEQ ID NO: 2589 - RNA, 20 nt, Artificial Sequence
  Description of Artificial Sequence: Synthetic oligonucleotide
ucuuucaauaucauggacuu

SEQ ID NO: 2590 - RNA, 20 nt, Artificial Sequence
  Description of Artificial Sequence: Synthetic oligonucleotide
aucuuucaauaucauggacu

SEQ ID NO: 2591 - RNA, 20 nt, Artificial Sequence
  Description of Artificial Sequence: Synthetic oligonucleotide
gaucuuucaauaucauggac

SEQ ID NO: 2592 - RNA, 20 nt, Artificial Sequence
  Description of Artificial Sequence: Synthetic oligonucleotide
agaucuuucaauaucaugga

SEQ ID NO: 2593 - RNA, 20 nt, Artificial Sequence
  Description of Artificial Sequence: Synthetic oligonucleotide
cagaucuuucaauaucaugg

SEQ ID NO: 2594 - RNA, 20 nt, Artificial Sequence
  Description of Artificial Sequence: Synthetic oligonucleotide
ucagaucuuucaauaucaug

SEQ ID NO: 2595 - RNA, 20 nt, Artificial Sequence
  Description of Artificial Sequence: Synthetic oligonucleotide
uucagaucuuucaauaucau

SEQ ID NO: 2596 - RNA, 20 nt, Artificial Sequence
  Description of Artificial Sequence: Synthetic oligonucleotide
cuucagaucuuucaauauca

SEQ ID NO: 2597 - RNA, 20 nt, Artificial Sequence
  Description of Artificial Sequence: Synthetic oligonucleotide
ucuucagaucuuucaauauc

SEQ ID NO: 2598 - RNA, 20 nt, Artificial Sequence
  Description of Artificial Sequence: Synthetic oligonucleotide
uucuucagaucuuucaauau

SEQ ID NO: 2599 - RNA, 20 nt, Artificial Sequence
  Description of Artificial Sequence: Synthetic oligonucleotide
cuucuucagaucuuucaaua

SEQ ID NO: 2600 - RNA, 20 nt, Artificial Sequence
  Description of Artificial Sequence: Synthetic oligonucleotide
ucuucuucagaucuuucaau

SEQ ID NO: 2601 - RNA, 20 nt, Artificial Sequence
  Description of Artificial Sequence: Synthetic oligonucleotide
aucuucuucagaucuuucaa

SEQ ID NO: 2602 - RNA, 20 nt, Artificial Sequence
  Description of Artificial Sequence: Synthetic oligonucleotide
caucuucuucagaucuuuca

SEQ ID NO: 2603 - RNA, 20 nt, Artificial Sequence
  Description of Artificial Sequence: Synthetic oligonucleotide
ucaucuucuucagaucuuuc

SEQ ID NO: 2604 - RNA, 20 nt, Artificial Sequence
  Description of Artificial Sequence: Synthetic oligonucleotide
aucaucuucuucagaucuuu

SEQ ID NO: 2605 - RNA, 20 nt, Artificial Sequence
  Description of Artificial Sequence: Synthetic oligonucleotide
gaucaucuucuucagaucuu

SEQ ID NO: 2606 - RNA, 20 nt, Artificial Sequence
  Description of Artificial Sequence: Synthetic oligonucleotide
ugaucaucuucuucagaucu

SEQ ID NO: 2607 - RNA, 20 nt, Artificial Sequence
  Description of Artificial Sequence: Synthetic oligonucleotide
cugaucaucuucuucagauc

SEQ ID NO: 2608 - RNA, 20 nt, Artificial Sequence
  Description of Artificial Sequence: Synthetic oligonucleotide
acugaucaucuucuucagau

SEQ ID NO: 2609 - RNA, 20 nt, Artificial Sequence
  Description of Artificial Sequence: Synthetic oligonucleotide
aacugaucaucuucuucaga

SEQ ID NO: 2610 - RNA, 20 nt, Artificial Sequence
  Description of Artificial Sequence: Synthetic oligonucleotide
gaacugaucaucuucuucag

SEQ ID NO: 2611 - RNA, 20 nt, Artificial Sequence
  Description of Artificial Sequence: Synthetic oligonucleotide
ugaacugaucaucuucuuca

SEQ ID NO: 2612 - RNA, 20 nt, Artificial Sequence
  Description of Artificial Sequence: Synthetic oligonucleotide
augaacugaucaucuucuuc

SEQ ID NO: 2613 - RNA, 20 nt, Artificial Sequence
  Description of Artificial Sequence: Synthetic oligonucleotide
aaugaacugaucaucuucuu

SEQ ID NO: 2614 - RNA, 20 nt, Artificial Sequence
  Description of Artificial Sequence: Synthetic oligonucleotide
uaaugaacugaucaucuucu

SEQ ID NO: 2615 - RNA, 20 nt, Artificial Sequence
  Description of Artificial Sequence: Synthetic oligonucleotide
auaaugaacugaucaucuuc

SEQ ID NO: 2616 - RNA, 20 nt, Artificial Sequence
  Description of Artificial Sequence: Synthetic oligonucleotide
gauaaugaacugaucaucuu

SEQ ID NO: 2617 - RNA, 20 nt, Artificial Sequence
  Description of Artificial Sequence: Synthetic oligonucleotide
ggauaaugaacugaucaucu

SEQ ID NO: 2618 - RNA, 20 nt, Artificial Sequence
  Description of Artificial Sequence: Synthetic oligonucleotide
aggauaaugaacugaucauc

SEQ ID NO: 2619 - RNA, 20 nt, Artificial Sequence
  Description of Artificial Sequence: Synthetic oligonucleotide
aaggauaaugaacugaucau

SEQ ID NO: 2620 - RNA, 20 nt, Artificial Sequence
  Description of Artificial Sequence: Synthetic oligonucleotide
caaggauaaugaacugauca

SEQ ID NO: 2621 - RNA, 20 nt, Artificial Sequence
  Description of Artificial Sequence: Synthetic oligonucleotide
gcaaggauaaugaacugauc

SEQ ID NO: 2622 - RNA, 20 nt, Artificial Sequence
  Description of Artificial Sequence: Synthetic oligonucleotide
ugcaaggauaaugaacugau

SEQ ID NO: 2623 - RNA, 20 nt, Artificial Sequence
  Description of Artificial Sequence: Synthetic oligonucleotide
augcaaggauaaugaacuga

SEQ ID NO: 2624 - RNA, 20 nt, Artificial Sequence
  Description of Artificial Sequence: Synthetic oligonucleotide
caugcaaggauaaugaacug

SEQ ID NO: 2625 - RNA, 20 nt, Artificial Sequence
  Description of Artificial Sequence: Synthetic oligonucleotide
acaugcaaggauaaugaacu

SEQ ID NO: 2626 - RNA, 20 nt, Artificial Sequence
  Description of Artificial Sequence: Synthetic oligonucleotide
cacaugcaaggauaaugaac

SEQ ID NO: 2627 - RNA, 20 nt, Artificial Sequence
  Description of Artificial Sequence: Synthetic oligonucleotide
ucacaugcaaggauaaugaa

SEQ ID NO: 2628 - RNA, 20 nt, Artificial Sequence
  Description of Artificial Sequence: Synthetic oligonucleotide
aucacaugcaaggauaauga

SEQ ID NO: 2629 - RNA, 20 nt, Artificial Sequence
  Description of Artificial Sequence: Synthetic oligonucleotide
caucacaugcaaggauaaug

SEQ ID NO: 2630 - RNA, 20 nt, Artificial Sequence
  Description of Artificial Sequence: Synthetic oligonucleotide
ccaucacaugcaaggauaau

SEQ ID NO: 2631 - RNA, 20 nt, Artificial Sequence
  Description of Artificial Sequence: Synthetic oligonucleotide
accaucacaugcaaggauaa

SEQ ID NO: 2632 - RNA, 20 nt, Artificial Sequence
  Description of Artificial Sequence: Synthetic oligonucleotide
uaccaucacaugcaaggaua

SEQ ID NO: 2633 - RNA, 20 nt, Artificial Sequence
  Description of Artificial Sequence: Synthetic oligonucleotide
auaccaucacaugcaaggau

SEQ ID NO: 2634 - RNA, 20 nt, Artificial Sequence
  Description of Artificial Sequence: Synthetic oligonucleotide
gauaccaucacaugcaagga

SEQ ID NO: 2635 - RNA, 20 nt, Artificial Sequence
  Description of Artificial Sequence: Synthetic oligonucleotide
agauaccaucacaugcaagg

SEQ ID NO: 2636 - RNA, 20 nt, Artificial Sequence
  Description of Artificial Sequence: Synthetic oligonucleotide
cagauaccaucacaugcaag

SEQ ID NO: 2637 - RNA, 20 nt, Artificial Sequence
  Description of Artificial Sequence: Synthetic oligonucleotide
ccagauaccaucacaugcaa

SEQ ID NO: 2638 - RNA, 20 nt, Artificial Sequence
  Description of Artificial Sequence: Synthetic oligonucleotide
cccagauaccaucacaugca

SEQ ID NO: 2639 - RNA, 20 nt, Artificial Sequence
  Description of Artificial Sequence: Synthetic oligonucleotide
ucccagauaccaucacaugc

SEQ ID NO: 2640 - RNA, 20 nt, Artificial Sequence
  Description of Artificial Sequence: Synthetic oligonucleotide
aucccagauaccaucacaug

SEQ ID NO: 2641 - RNA, 20 nt, Artificial Sequence
  Description of Artificial Sequence: Synthetic oligonucleotide
caucccagauaccaucacau

SEQ ID NO: 2642 - RNA, 20 nt, Artificial Sequence
  Description of Artificial Sequence: Synthetic oligonucleotide
acaucccagauaccaucaca

SEQ ID NO: 2643 - RNA, 20 nt, Artificial Sequence
  Description of Artificial Sequence: Synthetic oligonucleotide
aacaucccagauaccaucac

SEQ ID NO: 2644 - RNA, 20 nt, Artificial Sequence
  Description of Artificial Sequence: Synthetic oligonucleotide
uaacaucccagauaccauca

SEQ ID NO: 2645 - RNA, 20 nt, Artificial Sequence
  Description of Artificial Sequence: Synthetic oligonucleotide
auaacaucccagauaccauc

SEQ ID NO: 2646 - RNA, 20 nt, Artificial Sequence
  Description of Artificial Sequence: Synthetic oligonucleotide
cauaacaucccagauaccau

SEQ ID NO: 2647 - RNA, 20 nt, Artificial Sequence
  Description of Artificial Sequence: Synthetic oligonucleotide
ccauaacaucccagauacca

SEQ ID NO: 2648 - RNA, 20 nt, Artificial Sequence
  Description of Artificial Sequence: Synthetic oligonucleotide
cccauaacaucccagauacc

SEQ ID NO: 2649 - RNA, 20 nt, Artificial Sequence
  Description of Artificial Sequence: Synthetic oligonucleotide
ucccauaacaucccagauac

SEQ ID NO: 2650 - RNA, 20 nt, Artificial Sequence
  Description of Artificial Sequence: Synthetic oligonucleotide
uucccauaacaucccagaua

SEQ ID NO: 2651 - RNA, 20 nt, Artificial Sequence
  Description of Artificial Sequence: Synthetic oligonucleotide
uuucccauaacaucccagau

SEQ ID NO: 2652 - RNA, 20 nt, Artificial Sequence
  Description of Artificial Sequence: Synthetic oligonucleotide
auuucccauaacaucccaga

SEQ ID NO: 2653 - RNA, 20 nt, Artificial Sequence
  Description of Artificial Sequence: Synthetic oligonucleotide
cauuucccauaacaucccag

SEQ ID NO: 2654 - RNA, 20 nt, Artificial Sequence
  Description of Artificial Sequence: Synthetic oligonucleotide
ucauuucccauaacauccca

SEQ ID NO: 2655 - RNA, 20 nt, Artificial Sequence
  Description of Artificial Sequence: Synthetic oligonucleotide
uucauuucccauaacauccc

SEQ ID NO: 2656 - RNA, 20 nt, Artificial Sequence
  Description of Artificial Sequence: Synthetic oligonucleotide
cuucauuucccauaacaucc

SEQ ID NO: 2657 - RNA, 20 nt, Artificial Sequence
  Description of Artificial Sequence: Synthetic oligonucleotide
ucuucauuucccauaacauc

SEQ ID NO: 2658 - RNA, 20 nt, Artificial Sequence
  Description of Artificial Sequence: Synthetic oligonucleotide
cucuucauuucccauaacau

SEQ ID NO: 2659 - RNA, 20 nt, Artificial Sequence
  Description of Artificial Sequence: Synthetic oligonucleotide
gcucuucauuucccauaaca

SEQ ID NO: 2660 - RNA, 20 nt, Artificial Sequence
  Description of Artificial Sequence: Synthetic oligonucleotide
agcucuucauuucccauaac

SEQ ID NO: 2661 - RNA, 20 nt, Artificial Sequence
  Description of Artificial Sequence: Synthetic oligonucleotide
gagcucuucauuucccauaa

SEQ ID NO: 2662 - RNA, 20 nt, Artificial Sequence
  Description of Artificial Sequence: Synthetic oligonucleotide
agagcucuucauuucccaua

SEQ ID NO: 2663 - RNA, 20 nt, Artificial Sequence
  Description of Artificial Sequence: Synthetic oligonucleotide
cagagcucuucauuucccau

SEQ ID NO: 2664 - RNA, 20 nt, Artificial Sequence
  Description of Artificial Sequence: Synthetic oligonucleotide
acagagcucuucauuuccca

SEQ ID NO: 2665 - RNA, 20 nt, Artificial Sequence
  Description of Artificial Sequence: Synthetic oligonucleotide
cacagagcucuucauuuccc

SEQ ID NO: 2666 - RNA, 20 nt, Artificial Sequence
  Description of Artificial Sequence: Synthetic oligonucleotide
ucacagagcucuucauuucc

SEQ ID NO: 2667 - RNA, 20 nt, Artificial Sequence
  Description of Artificial Sequence: Synthetic oligonucleotide
aucacagagcucuucauuuc

SEQ ID NO: 2668 - RNA, 20 nt, Artificial Sequence
  Description of Artificial Sequence: Synthetic oligonucleotide
aaucacagagcucuucauuu

SEQ ID NO: 2669 - RNA, 20 nt, Artificial Sequence
  Description of Artificial Sequence: Synthetic oligonucleotide
aaaucacagagcucuucauu

SEQ ID NO: 2670 - RNA, 20 nt, Artificial Sequence
  Description of Artificial Sequence: Synthetic oligonucleotide
aaaaucacagagcucuucau

SEQ ID NO: 2671 - RNA, 20 nt, Artificial Sequence
  Description of Artificial Sequence: Synthetic oligonucleotide
caaaaucacagagcucuuca

SEQ ID NO: 2672 - RNA, 20 nt, Artificial Sequence
  Description of Artificial Sequence: Synthetic oligonucleotide
acaaaaucacagagcucuuc

SEQ ID NO: 2673 - RNA, 20 nt, Artificial Sequence
  Description of Artificial Sequence: Synthetic oligonucleotide
uacaaaaucacagagcucuu

SEQ ID NO: 2674 - RNA, 20 nt, Artificial Sequence
  Description of Artificial Sequence: Synthetic oligonucleotide
uuacaaaaucacagagcucu

SEQ ID NO: 2675 - RNA, 20 nt, Artificial Sequence
  Description of Artificial Sequence: Synthetic oligonucleotide
cuuacaaaaucacagagcuc

SEQ ID NO: 2676 - RNA, 20 nt, Artificial Sequence
  Description of Artificial Sequence: Synthetic oligonucleotide
ucuuacaaaaucacagagcu

SEQ ID NO: 2677 - RNA, 20 nt, Artificial Sequence
  Description of Artificial Sequence: Synthetic oligonucleotide
aucuuacaaaaucacagagc

SEQ ID NO: 2678 - RNA, 20 nt, Artificial Sequence
  Description of Artificial Sequence: Synthetic oligonucleotide
gaucuuacaaaaucacagag

SEQ ID NO: 2679 - RNA, 20 nt, Artificial Sequence
  Description of Artificial Sequence: Synthetic oligonucleotide
ggaucuuacaaaaucacaga

SEQ ID NO: 2680 - RNA, 20 nt, Artificial Sequence
  Description of Artificial Sequence: Synthetic oligonucleotide
uggaucuuacaaaaucacag

SEQ ID NO: 2681 - RNA, 20 nt, Artificial Sequence
  Description of Artificial Sequence: Synthetic oligonucleotide
cuggaucuuacaaaaucaca

SEQ ID NO: 2682 - RNA, 20 nt, Artificial Sequence
  Description of Artificial Sequence: Synthetic oligonucleotide
ucuggaucuuacaaaaucac

SEQ ID NO: 2683 - RNA, 20 nt, Artificial Sequence
  Description of Artificial Sequence: Synthetic oligonucleotide
gucuggaucuuacaaaauca

SEQ ID NO: 2684 - RNA, 20 nt, Artificial Sequence
  Description of Artificial Sequence: Synthetic oligonucleotide
agucuggaucuuacaaaauc

SEQ ID NO: 2685 - RNA, 20 nt, Artificial Sequence
  Description of Artificial Sequence: Synthetic oligonucleotide
aagucuggaucuuacaaaau

SEQ ID NO: 2686 - RNA, 20 nt, Artificial Sequence
  Description of Artificial Sequence: Synthetic oligonucleotide
caagucuggaucuuacaaaa

SEQ ID NO: 2687 - RNA, 20 nt, Artificial Sequence
  Description of Artificial Sequence: Synthetic oligonucleotide
ucaagucuggaucuuacaaa

SEQ ID NO: 2688 - RNA, 20 nt, Artificial Sequence
  Description of Artificial Sequence: Synthetic oligonucleotide
uucaagucuggaucuuacaa

SEQ ID NO: 2689 - RNA, 20 nt, Artificial Sequence
  Description of Artificial Sequence: Synthetic oligonucleotide
cuucaagucuggaucuuaca

SEQ ID NO: 2690 - RNA, 20 nt, Artificial Sequence
  Description of Artificial Sequence: Synthetic oligonucleotide
acuucaagucuggaucuuac

SEQ ID NO: 2691 - RNA, 20 nt, Artificial Sequence
  Description of Artificial Sequence: Synthetic oligonucleotide
gacuucaagucuggaucuua

SEQ ID NO: 2692 - RNA, 20 nt, Artificial Sequence
  Description of Artificial Sequence: Synthetic oligonucleotide
ugacuucaagucuggaucuu

SEQ ID NO: 2693 - RNA, 20 nt, Artificial Sequence
  Description of Artificial Sequence: Synthetic oligonucleotide
gugacuucaagucuggaucu

SEQ ID NO: 2694 - RNA, 20 nt, Artificial Sequence
  Description of Artificial Sequence: Synthetic oligonucleotide
agugacuucaagucuggauc

SEQ ID NO: 2695 - RNA, 20 nt, Artificial Sequence
  Description of Artificial Sequence: Synthetic oligonucleotide
cagugacuucaagucuggau

SEQ ID NO: 2696 - RNA, 20 nt, Artificial Sequence
  Description of Artificial Sequence: Synthetic oligonucleotide
ucagugacuucaagucugga

SEQ ID NO: 2697 - RNA, 20 nt, Artificial Sequence
  Description of Artificial Sequence: Synthetic oligonucleotide
aucagugacuucaagucugg

SEQ ID NO: 2698 - RNA, 20 nt, Artificial Sequence
  Description of Artificial Sequence: Synthetic oligonucleotide
caucagugacuucaagucug

SEQ ID NO: 2699 - RNA, 20 nt, Artificial Sequence
  Description of Artificial Sequence: Synthetic oligonucleotide
ucaucagugacuucaagucu

SEQ ID NO: 2700 - RNA, 20 nt, Artificial Sequence
  Description of Artificial Sequence: Synthetic oligonucleotide
gucaucagugacuucaaguc

SEQ ID NO: 2701 - RNA, 20 nt, Artificial Sequence
  Description of Artificial Sequence: Synthetic oligonucleotide
ggucaucagugacuucaagu

SEQ ID NO: 2702 - RNA, 20 nt, Artificial Sequence
  Description of Artificial Sequence: Synthetic oligonucleotide
aggucaucagugacuucaag

SEQ ID NO: 2703 - RNA, 20 nt, Artificial Sequence
  Description of Artificial Sequence: Synthetic oligonucleotide
aaggucaucagugacuucaa

SEQ ID NO: 2704 - RNA, 20 nt, Artificial Sequence
  Description of Artificial Sequence: Synthetic oligonucleotide
caaggucaucagugacuuca

SEQ ID NO: 2705 - RNA, 20 nt, Artificial Sequence
  Description of Artificial Sequence: Synthetic oligonucleotide
ucaaggucaucagugacuuc

SEQ ID NO: 2706 - RNA, 20 nt, Artificial Sequence
  Description of Artificial Sequence: Synthetic oligonucleotide
cucaaggucaucagugacuu

SEQ ID NO: 2707 - RNA, 20 nt, Artificial Sequence
  Description of Artificial Sequence: Synthetic oligonucleotide
ucucaaggucaucagugacu

SEQ ID NO: 2708 - RNA, 20 nt, Artificial Sequence
  Description of Artificial Sequence: Synthetic oligonucleotide
uucucaaggucaucagugac

SEQ ID NO: 2709 - RNA, 20 nt, Artificial Sequence
  Description of Artificial Sequence: Synthetic oligonucleotide
uuucucaaggucaucaguga

SEQ ID NO: 2710 - RNA, 20 nt, Artificial Sequence
  Description of Artificial Sequence: Synthetic oligonucleotide
cuuucucaaggucaucagug

SEQ ID NO: 2711 - RNA, 20 nt, Artificial Sequence
  Description of Artificial Sequence: Synthetic oligonucleotide
acuuucucaaggucaucagu

SEQ ID NO: 2712 - RNA, 20 nt, Artificial Sequence
  Description of Artificial Sequence: Synthetic oligonucleotide
aacuuucucaaggucaucag

SEQ ID NO: 2713 - RNA, 20 nt, Artificial Sequence
  Description of Artificial Sequence: Synthetic oligonucleotide
aaacuuucucaaggucauca

SEQ ID NO: 2714 - RNA, 20 nt, Artificial Sequence
  Description of Artificial Sequence: Synthetic oligonucleotide
caaacuuucucaaggucauc

SEQ ID NO: 2715 - RNA, 20 nt, Artificial Sequence
  Description of Artificial Sequence: Synthetic oligonucleotide
gcaaacuuucucaaggucau

SEQ ID NO: 2716 - RNA, 20 nt, Artificial Sequence
  Description of Artificial Sequence: Synthetic oligonucleotide
ugcaaacuuucucaagguca

SEQ ID NO: 2717 - RNA, 20 nt, Artificial Sequence
  Description of Artificial Sequence: Synthetic oligonucleotide
uugcaaacuuucucaagguc

SEQ ID NO: 2718 - RNA, 20 nt, Artificial Sequence
  Description of Artificial Sequence: Synthetic oligonucleotide
auugcaaacuuucucaaggu

SEQ ID NO: 2719 - RNA, 20 nt, Artificial Sequence
  Description of Artificial Sequence: Synthetic oligonucleotide
cauugcaaacuuucucaagg

SEQ ID NO: 2720 - RNA, 20 nt, Artificial Sequence
  Description of Artificial Sequence: Synthetic oligonucleotide
ucauugcaaacuuucucaag

SEQ ID NO: 2721 - RNA, 20 nt, Artificial Sequence
  Description of Artificial Sequence: Synthetic oligonucleotide
uucauugcaaacuuucucaa

SEQ ID NO: 2722 - RNA, 20 nt, Artificial Sequence
  Description of Artificial Sequence: Synthetic oligonucleotide
cuucauugcaaacuuucuca

SEQ ID NO: 2723 - RNA, 20 nt, Artificial Sequence
  Description of Artificial Sequence: Synthetic oligonucleotide
acuucauugcaaacuuucuc

SEQ ID NO: 2724 - RNA, 20 nt, Artificial Sequence
  Description of Artificial Sequence: Synthetic oligonucleotide
uacuucauugcaaacuuucu

SEQ ID NO: 2725 - RNA, 20 nt, Artificial Sequence
  Description of Artificial Sequence: Synthetic oligonucleotide
cuacuucauugcaaacuuuc

SEQ ID NO: 2726 - RNA, 20 nt, Artificial Sequence
  Description of Artificial Sequence: Synthetic oligonucleotide
acuacuucauugcaaacuuu

SEQ ID NO: 2727 - RNA, 20 nt, Artificial Sequence
  Description of Artificial Sequence: Synthetic oligonucleotide
gacuacuucauugcaaacuu

SEQ ID NO: 2728 - RNA, 20 nt, Artificial Sequence
  Description of Artificial Sequence: Synthetic oligonucleotide
cgacuacuucauugcaaacu

SEQ ID NO: 2729 - RNA, 20 nt, Artificial Sequence
  Description of Artificial Sequence: Synthetic oligonucleotide
ucgacuacuucauugcaaac

SEQ ID NO: 2730 - RNA, 20 nt, Artificial Sequence
  Description of Artificial Sequence: Synthetic oligonucleotide
gucgacuacuucauugcaaa

SEQ ID NO: 2731 - RNA, 20 nt, Artificial Sequence
  Description of Artificial Sequence: Synthetic oligonucleotide
ugucgacuacuucauugcaa

SEQ ID NO: 2732 - RNA, 20 nt, Artificial Sequence
  Description of Artificial Sequence: Synthetic oligonucleotide
gugucgacuacuucauugca

SEQ ID NO: 2733 - RNA, 20 nt, Artificial Sequence
  Description of Artificial Sequence: Synthetic oligonucleotide
ggugucgacuacuucauugc

SEQ ID NO: 2734 - RNA, 20 nt, Artificial Sequence
  Description of Artificial Sequence: Synthetic oligonucleotide
aggugucgacuacuucauug

SEQ ID NO: 2735 - RNA, 20 nt, Artificial Sequence
  Description of Artificial Sequence: Synthetic oligonucleotide
caggugucgacuacuucauu

SEQ ID NO: 2736 - RNA, 20 nt, Artificial Sequence
  Description of Artificial Sequence: Synthetic oligonucleotide
acaggugucgacuacuucau

SEQ ID NO: 2737 - RNA, 20 nt, Artificial Sequence
  Description of Artificial Sequence: Synthetic oligonucleotide
aacaggugucgacuacuuca

SEQ ID NO: 2738 - RNA, 20 nt, Artificial Sequence
  Description of Artificial Sequence: Synthetic oligonucleotide
aaacaggugucgacuacuuc

SEQ ID NO: 2739 - RNA, 20 nt, Artificial Sequence
  Description of Artificial Sequence: Synthetic oligonucleotide
caaacaggugucgacuacuu

SEQ ID NO: 2740 - RNA, 20 nt, Artificial Sequence
  Description of Artificial Sequence: Synthetic oligonucleotide
acaaacaggugucgacuacu

SEQ ID NO: 2741 - RNA, 20 nt, Artificial Sequence
  Description of Artificial Sequence: Synthetic oligonucleotide
uacaaacaggugucgacuac

SEQ ID NO: 2742 - RNA, 20 nt, Artificial Sequence
  Description of Artificial Sequence: Synthetic oligonucleotide
auacaaacaggugucgacua

SEQ ID NO: 2743 - RNA, 20 nt, Artificial Sequence
  Description of Artificial Sequence: Synthetic oligonucleotide
uauacaaacaggugucgacu

SEQ ID NO: 2744 - RNA, 20 nt, Artificial Sequence
  Description of Artificial Sequence: Synthetic oligonucleotide
uuauacaaacaggugucgac

SEQ ID NO: 2745 - RNA, 20 nt, Artificial Sequence
  Description of Artificial Sequence: Synthetic oligonucleotide
cuuauacaaacaggugucga

SEQ ID NO: 2746 - RNA, 20 nt, Artificial Sequence
  Description of Artificial Sequence: Synthetic oligonucleotide
ccuuauacaaacaggugucg

SEQ ID NO: 2747 - RNA, 20 nt, Artificial Sequence
  Description of Artificial Sequence: Synthetic oligonucleotide
cccuuauacaaacagguguc

SEQ ID NO: 2748 - RNA, 20 nt, Artificial Sequence
  Description of Artificial Sequence: Synthetic oligonucleotide
ucccuuauacaaacaggugu

SEQ ID NO: 2749 - RNA, 20 nt, Artificial Sequence
  Description of Artificial Sequence: Synthetic oligonucleotide
uucccuuauacaaacaggug

SEQ ID NO: 2750 - RNA, 20 nt, Artificial Sequence
  Description of Artificial Sequence: Synthetic oligonucleotide
cuucccuuauacaaacaggu

SEQ ID NO: 2751 - RNA, 20 nt, Artificial Sequence
  Description of Artificial Sequence: Synthetic oligonucleotide
acuucccuuauacaaacagg

SEQ ID NO: 2752 - RNA, 20 nt, Artificial Sequence
  Description of Artificial Sequence: Synthetic oligonucleotide
gacuucccuuauacaaacag

SEQ ID NO: 2753 - RNA, 20 nt, Artificial Sequence
  Description of Artificial Sequence: Synthetic oligonucleotide
cgacuucccuuauacaaaca

SEQ ID NO: 2754 - RNA, 20 nt, Artificial Sequence
  Description of Artificial Sequence: Synthetic oligonucleotide
ucgacuucccuuauacaaac

SEQ ID NO: 2755 - RNA, 20 nt, Artificial Sequence
  Description of Artificial Sequence: Synthetic oligonucleotide
cucgacuucccuuauacaaa

SEQ ID NO: 2756 - RNA, 20 nt, Artificial Sequence
  Description of Artificial Sequence: Synthetic oligonucleotide
ucucgacuucccuuauacaa

SEQ ID NO: 2757 - RNA, 20 nt, Artificial Sequence
  Description of Artificial Sequence: Synthetic oligonucleotide
gucucgacuucccuuauaca

SEQ ID NO: 2758 - RNA, 20 nt, Artificial Sequence
  Description of Artificial Sequence: Synthetic oligonucleotide
ugucucgacuucccuuauac

SEQ ID NO: 2759 - RNA, 20 nt, Artificial Sequence
  Description of Artificial Sequence: Synthetic oligonucleotide
uugucucgacuucccuuaua

SEQ ID NO: 2760 - RNA, 20 nt, Artificial Sequence
  Description of Artificial Sequence: Synthetic oligonucleotide
guugucucgacuucccuuau

SEQ ID NO: 2761 - RNA, 20 nt, Artificial Sequence
  Description of Artificial Sequence: Synthetic oligonucleotide
uguugucucgacuucccuua

SEQ ID NO: 2762 - RNA, 20 nt, Artificial Sequence
  Description of Artificial Sequence: Synthetic oligonucleotide
auguugucucgacuucccuu

SEQ ID NO: 2763 - RNA, 20 nt, Artificial Sequence
  Description of Artificial Sequence: Synthetic oligonucleotide
cauguugucucgacuucccu

SEQ ID NO: 2764 - RNA, 20 nt, Artificial Sequence
  Description of Artificial Sequence: Synthetic oligonucleotide
ucauguugucucgacuuccc

SEQ ID NO: 2765 - RNA, 20 nt, Artificial Sequence
  Description of Artificial Sequence: Synthetic oligonucleotide
cucauguugucucgacuucc

SEQ ID NO: 2766 - RNA, 20 nt, Artificial Sequence
  Description of Artificial Sequence: Synthetic oligonucleotide
acucauguugucucgacuuc

SEQ ID NO: 2767 - RNA, 20 nt, Artificial Sequence
  Description of Artificial Sequence: Synthetic oligonucleotide
cacucauguugucucgacuu

SEQ ID NO: 2768 - RNA, 20 nt, Artificial Sequence
  Description of Artificial Sequence: Synthetic oligonucleotide
acacucauguugucucgacu

SEQ ID NO: 2769 - RNA, 20 nt, Artificial Sequence
  Description of Artificial Sequence: Synthetic oligonucleotide
cacacucauguugucucgac

SEQ ID NO: 2770 - RNA, 20 nt, Artificial Sequence
  Description of Artificial Sequence: Synthetic oligonucleotide
ucacacucauguugucucga

SEQ ID NO: 2771 - RNA, 20 nt, Artificial Sequence
  Description of Artificial Sequence: Synthetic oligonucleotide
aucacacucauguugucucg

SEQ ID NO: 2772 - RNA, 20 nt, Artificial Sequence
  Description of Artificial Sequence: Synthetic oligonucleotide
aaucacacucauguugucuc

SEQ ID NO: 2773 - RNA, 20 nt, Artificial Sequence
  Description of Artificial Sequence: Synthetic oligonucleotide
aaaucacacucauguugucu

SEQ ID NO: 2774 - RNA, 20 nt, Artificial Sequence
  Description of Artificial Sequence: Synthetic oligonucleotide
aaaaucacacucauguuguc

SEQ ID NO: 2775 - RNA, 20 nt, Artificial Sequence
  Description of Artificial Sequence: Synthetic oligonucleotide
caaaaucacacucauguugu

SEQ ID NO: 2776 - RNA, 20 nt, Artificial Sequence
  Description of Artificial Sequence: Synthetic oligonucleotide
ucaaaaucacacucauguug

SEQ ID NO: 2777 - RNA, 20 nt, Artificial Sequence
  Description of Artificial Sequence: Synthetic oligonucleotide
aucaaaaucacacucauguu

SEQ ID NO: 2778 - RNA, 20 nt, Artificial Sequence
  Description of Artificial Sequence: Synthetic oligonucleotide
gaucaaaaucacacucaugu

SEQ ID NO: 2779 - RNA, 20 nt, Artificial Sequence
  Description of Artificial Sequence: Synthetic oligonucleotide
agaucaaaaucacacucaug

SEQ ID NO: 2780 - RNA, 20 nt, Artificial Sequence
  Description of Artificial Sequence: Synthetic oligonucleotide
cagaucaaaaucacacucau

SEQ ID NO: 2781 - RNA, 20 nt, Artificial Sequence
  Description of Artificial Sequence: Synthetic oligonucleotide
acagaucaaaaucacacuca

SEQ ID NO: 2782 - RNA, 20 nt, Artificial Sequence
  Description of Artificial Sequence: Synthetic oligonucleotide
aacagaucaaaaucacacuc

SEQ ID NO: 2783 - RNA, 20 nt, Artificial Sequence
  Description of Artificial Sequence: Synthetic oligonucleotide
aaacagaucaaaaucacacu

SEQ ID NO: 2784 - RNA, 20 nt, Artificial Sequence
  Description of Artificial Sequence: Synthetic oligonucleotide
aaaacagaucaaaaucacac

SEQ ID NO: 2785 - RNA, 20 nt, Artificial Sequence
  Description of Artificial Sequence: Synthetic oligonucleotide
gaaaacagaucaaaaucaca

SEQ ID NO: 2786 - RNA, 20 nt, Artificial Sequence
  Description of Artificial Sequence: Synthetic oligonucleotide
ggaaaacagaucaaaaucac

SEQ ID NO: 2787 - RNA, 20 nt, Artificial Sequence
  Description of Artificial Sequence: Synthetic oligonucleotide
uggaaaacagaucaaaauca

SEQ ID NO: 2788 - RNA, 20 nt, Artificial Sequence
  Description of Artificial Sequence: Synthetic oligonucleotide
uuggaaaacagaucaaaauc

SEQ ID NO: 2789 - RNA, 20 nt, Artificial Sequence
  Description of Artificial Sequence: Synthetic oligonucleotide
uuuggaaaacagaucaaaau

SEQ ID NO: 2790 - RNA, 20 nt, Artificial Sequence
  Description of Artificial Sequence: Synthetic oligonucleotide
auuuggaaaacagaucaaaa

SEQ ID NO: 2791 - RNA, 20 nt, Artificial Sequence
  Description of Artificial Sequence: Synthetic oligonucleotide
cauuuggaaaacagaucaaa

SEQ ID NO: 2792 - RNA, 20 nt, Artificial Sequence
  Description of Artificial Sequence: Synthetic oligonucleotide
gcauuuggaaaacagaucaa

SEQ ID NO: 2793 - RNA, 20 nt, Artificial Sequence
  Description of Artificial Sequence: Synthetic oligonucleotide
ugcauuuggaaaacagauca

SEQ ID NO: 2794 - RNA, 20 nt, Artificial Sequence
  Description of Artificial Sequence: Synthetic oligonucleotide
gugcauuuggaaaacagauc

SEQ ID NO: 2795 - RNA, 20 nt, Artificial Sequence
  Description of Artificial Sequence: Synthetic oligonucleotide
ggugcauuuggaaaacagau

SEQ ID NO: 2796 - RNA, 20 nt, Artificial Sequence
  Description of Artificial Sequence: Synthetic oligonucleotide
gggugcauuuggaaaacaga

SEQ ID NO: 2797 - RNA, 20 nt, Artificial Sequence
  Description of Artificial Sequence: Synthetic oligonucleotide
ugggugcauuuggaaaacag

SEQ ID NO: 2798 - RNA, 20 nt, Artificial Sequence
  Description of Artificial Sequence: Synthetic oligonucleotide
uugggugcauuuggaaaaca

SEQ ID NO: 2799 - RNA, 20 nt, Artificial Sequence
  Description of Artificial Sequence: Synthetic oligonucleotide
uuugggugcauuuggaaaac

SEQ ID NO: 2800 - RNA, 20 nt, Artificial Sequence
  Description of Artificial Sequence: Synthetic oligonucleotide
cuuugggugcauuuggaaaa

SEQ ID NO: 2801 - RNA, 20 nt, Artificial Sequence
  Description of Artificial Sequence: Synthetic oligonucleotide
acuuugggugcauuuggaaa

SEQ ID NO: 2802 - RNA, 20 nt, Artificial Sequence
  Description of Artificial Sequence: Synthetic oligonucleotide
uacuuugggugcauuuggaa

SEQ ID NO: 2803 - RNA, 20 nt, Artificial Sequence
  Description of Artificial Sequence: Synthetic oligonucleotide
auacuuugggugcauuugga

SEQ ID NO: 2804 - RNA, 20 nt, Artificial Sequence
  Description of Artificial Sequence: Synthetic oligonucleotide
gauacuuugggugcauuugg

SEQ ID NO: 2805 - RNA, 20 nt, Artificial Sequence
  Description of Artificial Sequence: Synthetic oligonucleotide
cgauacuuugggugcauuug

SEQ ID NO: 2806 - RNA, 20 nt, Artificial Sequence
  Description of Artificial Sequence: Synthetic oligonucleotide
gcgauacuuugggugcauuu

SEQ ID NO: 2807 - RNA, 20 nt, Artificial Sequence
  Description of Artificial Sequence: Synthetic oligonucleotide
ggcgauacuuugggugcauu

SEQ ID NO: 2808 - RNA, 20 nt, Artificial Sequence
  Description of Artificial Sequence: Synthetic oligonucleotide
uggcgauacuuugggugcau

SEQ ID NO: 2809 - RNA, 20 nt, Artificial Sequence
  Description of Artificial Sequence: Synthetic oligonucleotide
cuggcgauacuuugggugca

SEQ ID NO: 2810 - RNA, 20 nt, Artificial Sequence
  Description of Artificial Sequence: Synthetic oligonucleotide
ucuggcgauacuuugggugc

SEQ ID NO: 2811 - RNA, 20 nt, Artificial Sequence
  Description of Artificial Sequence: Synthetic oligonucleotide
uucuggcgauacuuugggug

SEQ ID NO: 2812 - RNA, 20 nt, Artificial Sequence
  Description of Artificial Sequence: Synthetic oligonucleotide
cuucuggcgauacuuugggu

SEQ ID NO: 2813 - RNA, 20 nt, Artificial Sequence
  Description of Artificial Sequence: Synthetic oligonucleotide
gcuucuggcgauacuuuggg

SEQ ID NO: 2814 - RNA, 20 nt, Artificial Sequence
  Description of Artificial Sequence: Synthetic oligonucleotide
ugcuucuggcgauacuuugg

SEQ ID NO: 2815 - RNA, 20 nt, Artificial Sequence
  Description of Artificial Sequence: Synthetic oligonucleotide
cugcuucuggcgauacuuug

SEQ ID NO: 2816 - RNA, 20 nt, Artificial Sequence
  Description of Artificial Sequence: Synthetic oligonucleotide
acugcuucuggcgauacuuu

SEQ ID NO: 2817 - RNA, 20 nt, Artificial Sequence
  Description of Artificial Sequence: Synthetic oligonucleotide
cacugcuucuggcgauacuu

SEQ ID NO: 2818 - RNA, 20 nt, Artificial Sequence
  Description of Artificial Sequence: Synthetic oligonucleotide
ucacugcuucuggcgauacu

SEQ ID NO: 2819 - RNA, 20 nt, Artificial Sequence
  Description of Artificial Sequence: Synthetic oligonucleotide
uucacugcuucuggcgauac

SEQ ID NO: 2820 - RNA, 20 nt, Artificial Sequence
  Description of Artificial Sequence: Synthetic oligonucleotide
cuucacugcuucuggcgaua

SEQ ID NO: 2821 - RNA, 20 nt, Artificial Sequence
  Description of Artificial Sequence: Synthetic oligonucleotide
ucuucacugcuucuggcgau

SEQ ID NO: 2822 - RNA, 20 nt, Artificial Sequence
  Description of Artificial Sequence: Synthetic oligonucleotide
uucuucacugcuucuggcga

SEQ ID NO: 2823 - RNA, 20 nt, Artificial Sequence
  Description of Artificial Sequence: Synthetic oligonucleotide
cuucuucacugcuucuggcg

SEQ ID NO: 2824 - RNA, 20 nt, Artificial Sequence
  Description of Artificial Sequence: Synthetic oligonucleotide
ccuucuucacugcuucuggc

SEQ ID NO: 2825 - RNA, 20 nt, Artificial Sequence
  Description of Artificial Sequence: Synthetic oligonucleotide
uccuucuucacugcuucugg

SEQ ID NO: 2826 - RNA, 20 nt, Artificial Sequence
  Description of Artificial Sequence: Synthetic oligonucleotide
cuccuucuucacugcuucug

SEQ ID NO: 2827 - RNA, 20 nt, Artificial Sequence
  Description of Artificial Sequence: Synthetic oligonucleotide
ccuccuucuucacugcuucu

SEQ ID NO: 2828 - RNA, 20 nt, Artificial Sequence
  Description of Artificial Sequence: Synthetic oligonucleotide
gccuccuucuucacugcuuc

SEQ ID NO: 2829 - RNA, 20 nt, Artificial Sequence
  Description of Artificial Sequence: Synthetic oligonucleotide
ugccuccuucuucacugcuu

SEQ ID NO: 2830 - RNA, 20 nt, Artificial Sequence
  Description of Artificial Sequence: Synthetic oligonucleotide
cugccuccuucuucacugcu

SEQ ID NO: 2831 - RNA, 20 nt, Artificial Sequence
  Description of Artificial Sequence: Synthetic oligonucleotide
ucugccuccuucuucacugc

SEQ ID NO: 2832 - RNA, 20 nt, Artificial Sequence
  Description of Artificial Sequence: Synthetic oligonucleotide
cucugccuccuucuucacug

SEQ ID NO: 2833 - RNA, 20 nt, Artificial Sequence
  Description of Artificial Sequence: Synthetic oligonucleotide
acucugccuccuucuucacu

SEQ ID NO: 2834 - RNA, 20 nt, Artificial Sequence
  Description of Artificial Sequence: Synthetic oligonucleotide
aacucugccuccuucuucac

SEQ ID NO: 2835 - RNA, 20 nt, Artificial Sequence
  Description of Artificial Sequence: Synthetic oligonucleotide
caacucugccuccuucuuca

SEQ ID NO: 2836 - RNA, 20 nt, Artificial Sequence
  Description of Artificial Sequence: Synthetic oligonucleotide
ccaacucugccuccuucuuc

SEQ ID NO: 2837 - RNA, 20 nt, Artificial Sequence
  Description of Artificial Sequence: Synthetic oligonucleotide
uccaacucugccuccuucuu

SEQ ID NO: 2838 - RNA, 20 nt, Artificial Sequence
  Description of Artificial Sequence: Synthetic oligonucleotide
guccaacucugccuccuucu

SEQ ID NO: 2839 - RNA, 20 nt, Artificial Sequence
  Description of Artificial Sequence: Synthetic oligonucleotide
uguccaacucugccuccuuc

SEQ ID NO: 2840 - RNA, 20 nt, Artificial Sequence
  Description of Artificial Sequence: Synthetic oligonucleotide
uuguccaacucugccuccuu

SEQ ID NO: 2841 - RNA, 20 nt, Artificial Sequence
  Description of Artificial Sequence: Synthetic oligonucleotide
cuuguccaacucugccuccu

SEQ ID NO: 2842 - RNA, 20 nt, Artificial Sequence
  Description of Artificial Sequence: Synthetic oligonucleotide
acuuguccaacucugccucc

SEQ ID NO: 2843 - RNA, 20 nt, Artificial Sequence
  Description of Artificial Sequence: Synthetic oligonucleotide
uacuuguccaacucugccuc

SEQ ID NO: 2844 - RNA, 20 nt, Artificial Sequence
  Description of Artificial Sequence: Synthetic oligonucleotide
guacuuguccaacucugccu

SEQ ID NO: 2845 - RNA, 20 nt, Artificial Sequence
  Description of Artificial Sequence: Synthetic oligonucleotide
gguacuuguccaacucugcc

SEQ ID NO: 2846 - RNA, 20 nt, Artificial Sequence
  Description of Artificial Sequence: Synthetic oligonucleotide
agguacuuguccaacucugc

SEQ ID NO: 2847 - RNA, 20 nt, Artificial Sequence
  Description of Artificial Sequence: Synthetic oligonucleotide
cagguacuuguccaacucug

SEQ ID NO: 2848 - RNA, 20 nt, Artificial Sequence
  Description of Artificial Sequence: Synthetic oligonucleotide
ccagguacuuguccaacucu

SEQ ID NO: 2849 - RNA, 20 nt, Artificial Sequence
  Description of Artificial Sequence: Synthetic oligonucleotide
uccagguacuuguccaacuc

SEQ ID NO: 2850 - RNA, 20 nt, Artificial Sequence
  Description of Artificial Sequence: Synthetic oligonucleotide
uuccagguacuuguccaacu

SEQ ID NO: 2851 - RNA, 20 nt, Artificial Sequence
  Description of Artificial Sequence: Synthetic oligonucleotide
auuccagguacuuguccaac

SEQ ID NO: 2852 - RNA, 20 nt, Artificial Sequence
  Description of Artificial Sequence: Synthetic oligonucleotide
cauuccagguacuuguccaa

SEQ ID NO: 2853 - RNA, 20 nt, Artificial Sequence
  Description of Artificial Sequence: Synthetic oligonucleotide
gcauuccagguacuugucca

SEQ ID NO: 2854 - RNA, 20 nt, Artificial Sequence
  Description of Artificial Sequence: Synthetic oligonucleotide
ugcauuccagguacuugucc

SEQ ID NO: 2855 - RNA, 20 nt, Artificial Sequence
  Description of Artificial Sequence: Synthetic oligonucleotide
cugcauuccagguacuuguc

SEQ ID NO: 2856 - RNA, 20 nt, Artificial Sequence
  Description of Artificial Sequence: Synthetic oligonucleotide
ucugcauuccagguacuugu

SEQ ID NO: 2857 - RNA, 20 nt, Artificial Sequence
  Description of Artificial Sequence: Synthetic oligonucleotide
cucugcauuccagguacuug

SEQ ID NO: 2858 - RNA, 20 nt, Artificial Sequence
  Description of Artificial Sequence: Synthetic oligonucleotide
acucugcauuccagguacuu

SEQ ID NO: 2859 - RNA, 20 nt, Artificial Sequence
  Description of Artificial Sequence: Synthetic oligonucleotide
uacucugcauuccagguacu

SEQ ID NO: 2860 - RNA, 20 nt, Artificial Sequence
  Description of Artificial Sequence: Synthetic oligonucleotide
cuacucugcauuccagguac

SEQ ID NO: 2861 - RNA, 20 nt, Artificial Sequence
  Description of Artificial Sequence: Synthetic oligonucleotide
ucuacucugcauuccaggua

SEQ ID NO: 2862 - RNA, 20 nt, Artificial Sequence
  Description of Artificial Sequence: Synthetic oligonucleotide
uucuacucugcauuccaggu

SEQ ID NO: 2863 - RNA, 20 nt, Artificial Sequence
  Description of Artificial Sequence: Synthetic oligonucleotide
cuucuacucugcauuccagg

SEQ ID NO: 2864 - DNA, 8231 bp, Homo sapiens
agaggcggcggcggcggcggtggcggcgctagggacgggagcgcgcgcgggagctagagagcagtggtctcggcgctcgtccggcccgcagcttcgggtcctcaggcggctgttgctccggaacgggtggttggggaggggggggtggggggactctagacagctgaggcgcgaaagcgatgagtcctcggctcttcctcctccttctccgggacccgctctctgcctccctctccaacgcccggatgatctgagccgcgagggcgccgacagccgggggcccggacgcagcccggctcctcccctcctccgccccttccccagcctgacctggcccgccgctgcagcggtgacccctcccccggctgccgccgtcgccgccgcggtgaccccctccccggctgccgccgccgccgcctcggccgaccagggacctgcccgcctgcggctgctccggacctagaggatcaagacataatgggagcatttttagacaagccaaagatggaaaagcataatgcccaggggcagggtaatgggttgcgatatgggctaagcagcatgcaaggctggcgtgttgaaatggaggatgcacatacggctgtgatcggtttgccaagtggacttgaatcgtggtcattctttgctgtgtatgatgggcatgctggttctcaggttgccaaatactgctgtgagcatttgttagatcacatcaccaataaccaggattttaaagggtctgcaggagcaccttctgtggaaaatgtaaagaatggaatcagaacaggttttctggagattgatgaacacatgagagttatgtcagagaagaaacatggtgcagatagaagtgggtcaacagctgtaggtgtcttaatttctccccaacatacttatttcattaactgtggagactcaagaggtttactttgtaggaacaggaaagttcatttcttcacacaagatcacaaaccaagtaatccgctggagaaagaacgaattcagaatgcaggtggctctgtaatgattcagcgtgtgaatggctctctggctgtatcgagggcccttggggattttgattacaaatgtgtccatggaaaaggtcctactgagcagcttgtctcaccagagcctgaagtccatgatattgaaagatctgaagaagatgatcagttcattatccttgcatgtgatggtatctgggatgttatgggaaatgaagagctctgtgattttgtaagatccagacttgaagtcactgatgaccttgagaaagtttgcaatgaagtagtcgacacctgtttgtataagggaagtcgagacaacatgagtgtgattttgatctgttttccaaatgcacccaaagtatcgccagaagcagtgaagaaggaggcagagttggacaagtacctggaatgcagagtagaagaaatcataaagaagcagggggaaggcgtccccgacttagtccatgtgatgcgcacattagcgagtgagaacatccccagcctcccaccagggggtgaattggcaagcaagaggaatgttattgaagccgtttacaatagactgaatccttacaaaaatgacgacactgactctacatcaacagatgatatgtggtaaaactgctcatctagccatggagtttaccttcacctccaaaggagagtacagctcaactttgttgaaacttttaacatccatcctcaactttaaggaaggggatatgacatgggtgagaatgattacatcagagaacttcagcagtacaacagctagcccagaactgatttttttttttttttttgtaaatttgagacttatgtaagcgtgatttcaaaccataattcgtgttgtaaatcagactccagcaatttttgttgtatgattttgtttttttgtaaagtgtaattgtccttgtacaaaatgctcatatttaattatgaactgctttaaatcactatcaaagttacaagaaatgtttggcttattgtgtgatgcaacagatatatagccctttcaagtcatgttgtgtttggacttggggttggaacagggagagcagcagccatgtcagctacacgctcaaatgtgcagatgattatggaaaataacctcaaaatcttacaaagctgaacatccaaggagttattgaaaactatcttaaatgttcttggtaggggagttggcattgttgataaagccagtcccttcatttaactgtctttcaggatgttccttcgttgtttccatgagtattgcaggtaataatacagtgtattcataagaatctcaatcttggggctaaatgccttgtttctttgcacctcttttcaagtccttacatttaattactaattgataagcagcagcttcctacatatagtaggaaactgccacatttttgctatcatgattggctgggcctgctgctgttcctagtaagatattctgaattccattttatcaataaagcttgatttaacaaacaagaaacttaatcatgtatgtgtaattcctcttttaccctggccttttaaaacactgtgccgttgtaatgagacgtttctcatagggaaagatgttagtctcttttaattggacaacactgtcactcaaggcatagatgaaactttccttccattagaaagactaaaagatttaattcttggttgtaccttaatctattttttaaataggtttctttcaggctgcttatttttcattaagatgtgtatcagcttggatttgcctactgtttaattaaaatatttattgtcaaagtttgacaatctaacactctatggtaggggtgtgtgtgtgtgtgtttgtgagtgtgtgtttgcctgtgatttttaattggcccatgtctttagaatccaagtggttaagatgtatttgtgatttgaaatatagcatgttgataatatttagctgttggcctttacaaataactttcaaagcttaaggaattgtagatataaaaataacctaatttaatttaggcttaaattcctctgattaagcatgtgaaagtaagttttaaaatctgtcgcattgaaaagattactgttccgtgcccttctgtatttttgtctctttaggttgaatattgtatttatcaccatgtaatcattcagtaggcagattcccactagaaaactgttgaaatgtaagactaaaatacaacattgaatacaaaatcaaaattttgtgtataaaaaccagtatagtccattttgttatatttgttttttccctaacttggaaatatacatatttgtatatatagccttaaaattaatgtaaagttaggggagtagtggggaaagtaatgtgaaatgtctcagatttaagtagttaaataccagcaaaatcttttcattatccctcttattttgtgaggtgattaaatgtaacttaattgtatttaatttatatcttattccagcatgaatgaggaaaaactgaagtactatttatatttagaaattcatatcagttgaaattacagaaccaattccatacttacaataaatacttaatgtctaaatctgtggtagagtgcgaagtatgataatgttctaagttatggctttgcaagcatctaaatgtgcatttaatgaataccagtgcttctagtatagactaattaccagacatactggtactgaaagctaaatccctattataacaaaccagttccttaatattttaagtagactgacaactttagttccagaaattgcaaaactttgaactggactgtgtaatcttttgagatgcaaaacttaagtcacaagtagagtatgtgatggaaagctgtatttcaaaccataacagcatatttagagccttttttttttgagtctttaaacaagagaaaattaaaatattcctgtcaaaattattagtattgaaattaggcttggacacgagagagaaccgtatttgagtgatgtgagaagactaaatcttttccacatgagtcagcactgccatactaataatttttttactataaaaatacaggaaggaagtatacattataacagcagactgtgtgtgttcctgattcctggaggtaatagtggggggaaaccaaccatactttttaaaggcacttttgcacctctattgtgcacttcattcttgtaccacttaaattcttcacccccatcccctttttttgtgctaattagcatctcagggcaatgcctcaaaaatgtttgatgtgttctgttctttggagggaaaaagttcttatgtgatgataatatagtactcaaaatatacttttatcatttaaatgtcttatttgctgctatgaataggaaataacattttgtatagcaggctctgttttaccctaacattaaaaaatttcactgatctttctttcattaacagggtagaatctcctaatttccactttcttgggaatatacttttatagacaatagaagcagttctcaatattagcatatactttaaaaaatcaaagtgataacttaattcagctttggaagtatctcaaacatatttttactttatagtgcattaacttgcttctagagtacttaatgcaactgctctagccacttaattttttatactaatctcaacattaagaaatttggattaagtaataaattagttatgtaattcaagtaatctgaattacagcagtacttttagtgatcattcataggactatatattaacccagctaataactcagtttttttacaaaatgtttcgagtattattggtaaaacactgttctaggctaagcacattgggactgtaaagaaatgagtagatccttggcttcaagtttacatctggacaatttataatctagtgtatgttagtattataactggatcactcatcaaaaaatatatatatatatctattgcccacctgctatctaccaggtacttagctgatcaaggcaggcccctgccctaaagaccttgtttatacttcctttactcacctgaaaactgttctccagtttattttcttctctctaaagttaaagagtaattcagaagaaaattttgcttagcataagaataaaattggactgaagaggcttaagcccattcagtatccttgattgcatttatccaacggcctttattcttcctgctgacagcagtaactcagaggaataggtagtagatttctgaaaattatccagccatggaaatgtaggtggggtttgagtttaaggcatttaaaaatgtaaatatctctagctaaatttatcttaagtagaactctgtgtttttgtaacacactgccagtgttaatatcaaattttagccaaattattactatgtgttttaatattttaaaataatttcactgcccatctttactggacaaactcatttggagttcaacttgtgatttctgaaagaactgatgaaattgggtactgctttttttctccatttttcgttttgttttaattttgaatttcatggtatatacttttagttcaaactcagctgtttgtacagtattgtattaggatttggtattagaaaagatgtgtaaatatcttagtatataattgtttctcatttgaggtttttcttctaagggaccttaaagagttttatatacttttgctcacagaaactgctggtgagattaccattttttgagtatctagtcttctagtttttcttttaggcattaggaagccttctttagagttcaaaattttagaagcctaatttgctcttacttccttcaattatgtgccatgtgttttggtttgtatatgttttaaattgtatatttccttggaatatgcttgaaatatttaagaatacattttcaaaatgtataatactgtattgttttgttgatcagaataataagtctcagttaaatgtttgttattactgatagtcaaaatgctcaatagaaatgatgagaggcattggttccaattcattgtcaaatgaacgttttctaattttgttcacagattctttccctttcgattgttctgtatgttaagatagtggcttctgctctcactgttttcctatttatattactagcaggtaggagtgctaattagaaaaacttagatggtattgaaattacagttgacaacttatatttttatgagatggagaaaaaagattaagttgatataacaacaaagtggactttttttcttccttatcctgcacgaaatattgcccttgtttcctctactttcctcttggtgttttctctttttttcaaacagaaacaggccaattccattttcttgagcaagaaagcttagtgtgttacttcatcaaggccagctaatactgtgttaaaccgggctgaaaatgagaaaacttgggagatggaggaatggggaaatggcagtgggataggtagggaaggattactcttaattgttttaaaagccataggaaagtcttccttgtacgtggctgtaaatttataagaactattgtgtcacataaaccaacaagaatgaacctttgctgcttcagataatttgatttttccagcaaggaaattaataagttactgattcttcagcatagaaacaactgagaagaattaatgcaatgtttcttcactagaaaacccaacccttcatttcttttcattgctccaaaacccagttttcaactaatggttttctcattaaactaaatgtttagaaaagttgtttagagtttttctttttcttttacatagtcctcctgatccagtataagactatttagtaacgtgcatttgtatggtactatctaaagtaagttagattgatgtaagagatcgggtagctgcggaacaaaattagttatatcctaattaggtacagtgaatgacacaaaatcattttagcaatgcttcttaaccttttggggtcacaggcgttttgagactgatgaatcctagggacttatttacccaggaaaatgcgtatataacatacatatctccctaaagtttacaatattgtagtggttcatgggccccctggttaagagcccattctaaagtacaatagggcatcatcccttttcctgcaaagcccaaaagtatatttctagggcatgaaaataacttgagtctattttaaggaattgtttcactctagaggtagataggggacctggctagaatctgacattaaaatatactttttaaaaaatattatatttggggtggggaaagtgattaaaaggtgaaaaaaaaacatagtattcagaagttttggaggttaatgtctttctctaagatttgccactttagaaattcaacagaaaagaggtaaaacagaaatggaatgtatctggaacatttttggcctccatagtgcagatatactatattaacaagtaatacatttatttacctgtcagatctccaggttttaagattttgagctttctagtattaggattcattaaatgttcaattcatttcatattctaaggaattaggttatttacttactaattcaggatgttaaaataacatccaagtcggacaaccaccaccaatgcacacagttaatgagatttctaaaatataataagtacaatgtaacaaacgtatagaattttgcatttgttgccaaaattagatgtttaatgacagcttatttaattcccatttgtgggacttctggaacatagaaaccattatcttacctggttatcccttgactaaatagcatatctgcaggaaaatatcttgtttgtagtgatatgccccaatagtgattgatttcactcttgaaatgagttatatcacttaatttgtataaatgttatgagtggagagacatgtacatgttaaaagcatgttgcattatatattcattttttaaactctataaatgttaagaataatataattgcagaaatatttttcttaaatacaatgtgtaacaaaattctccgtagcaactcacccactttgcagtttatgtgatccacacttttaaagaaattccataaatgtatattttgtattatgtattatttcctggtccaaagaaaatatgtgaattcagttctaactttaagaatgtactgtttgttttcaagttcattgaaaaattgcattcagcctgcgaatggttgcagattgtatgttagatgaaaagtagaaataatttctagtttggaaaactggtgccactaaataaacaggcaattacataa

SEQ ID NO: 2865 - DNA, 4334 bp, Homo sapiens
gctagggacgggagcgcgcgcgggagctagagagcagtggtctcggcgctcgtccggcccgcagcttcgggtcctcaggcggctgttgctccggaacgggtggttggggaggggggggtggggggactctagacagctgaggcgcgaaagcgatgagtcctcggctcttcctcctccttctccgggacccgctctctgcctccctctccaacgcccggatgatctgagccgcgagggcgccgacagccgggggcccggacgcagcccggctcctcccctcctccgccccttccccagcctgacctggcccgccgctgcagcggtgacccctcccccggctgccgccgtcgccgccgcggtgaccccctccccggctgccgccgccgccgcctcggccgaccagggacctgcccgcctgcggctgctccggattttaaataaacttggagccttttcttgaaagacagctggctgtggagagccttctaccaactgcagttttagatacgttttgaaaatttcatcacctgagacctagaggatcaagacataatgggagcatttttagacaagccaaagatggaaaagcataatgcccaggggcagggtaatgggttgcgatatgggctaagcagcatgcaaggctggcgtgttgaaatggaggatgcacatacggctgtgatcggtttgccaagtggacttgaatcgtggtcattctttgctgtgtatgatgggcatgctggttctcaggttgccaaatactgctgtgagcatttgttagatcacatcaccaataaccaggattttaaagggtctgcaggagcaccttctgtggaaaatgtaaagaatggaatcagaacaggttttctggagattgatgaacacatgagagttatgtcagagaagaaacatggtgcagatagaagtgggtcaacagctgtaggtgtcttaatttctccccaacatacttatttcattaactgtggagactcaagaggtttactttgtaggaacaggaaagttcatttcttcacacaagatcacaaaccaagtaatccgctggagaaagaacgaattcagaatgcaggtggctctgtaatgattcagcgtgtgaatggctctctggctgtatcgagggcccttggggattttgattacaaatgtgtccatggaaaaggtcctactgagcagcttgtctcaccagagcctgaagtccatgatattgaaagatctgaagaagatgatcagttcattatccttgcatgtgatggtatctgggatgttatgggaaatgaagagctctgtgattttgtaagatccagacttgaagtcactgatgaccttgagaaagtttgcaatgaagtagtcgacacctgtttgtataagggaagtcgagacaacatgagtgtgattttgatctgttttccaaatgcacccaaagtatcgccagaagcagtgaagaaggaggcagagttggacaagtacctggaatgcagagtagaaggtggatcatttaacaaaaaataagtagctttattaaagaaaaatcttcaacacaatcaaactttaacattttagcttttagatttttatgtgtctttgacagctagtgtctagtgtatgaaagtggaaaaggacatttctgtagtagctgttaagatgtatgcagttgtcctatcacagttatattagaaataacaactagtgtggaaagtaacccacattctgttcaggatacttttgttttaaaaggctaaaatgtttgtgtgctttaaaattcttaatgaattcactggcatgagtaattttatgccgggaaaatctgatttgtggtctatttaattacaaagagattgtgatggtgataatttgaataccatctttctatgaaaagctgtgtatattaattttaatctctagggccttttttcaataacttgaaaatcacagcctcatcattagcaactttatatacacagctttaaaaaatttgctttaaactgtttcagagcttcttccctaagccataaactgtctcacctaaacaagatagacctcaataaaagacataatatttctccacctggcagaaaagtaactgccaagtaagattaagaaataagttgagcatttctggagtatatttctcataattctgcagagacttccagtttattgcatatatgcagtaaagtgtatatattatgcagtttctctaagtggaaaaacttgacatgactttaatagtgttaaaacatgaaaatgctggtgagctgaggtagaaaaaaaacaagaaaaaaattttaaaaatagcgttaaaatgcattttaggctcctaatgtcgttaatttgcacgttaaagacctctaatcgcatgcaagcattgacctaccacacctacatcccactgtgcctgcattattgaaattactactcactttaattttttttcccctttttactgtttgataccaatcataatcagtctgatactagaatcatgattggttttgttctttagtactgtctagagctactattttgtttttattgctgtccgccacttgatagtcatacatctagtatgtgtttgtactatttagtattgcattcattggacgtactattcaacgaatttgtctccttactgttaccaagggtcttggaatttttatattttaaattaatcattcaatataagttatttataggtatagtacaattttaaaatatttagaatgctacaatcattggttcaaactattgattcatgggaaaatttaaattcataagaataatatgtatagggataagttgatatttaatgtattggcactttaacttgggcagacatgttttcttattggtttaaagaagtaataagtattttaatatttttactatgaaatgggatccaattttagaaatgaattgctacttttctctttagtgtgtacactttaagttttagatggaattatgaaatattcactttacgttattttgttacaataataagttttatatttcttattatcaagcaagagttgccacctggacagagtttacattgatactcaatatttttgatatgttaaagtgttattatacttgtaccattcaattggagattgtcataaattaaatatggtattttttactcagatttgatgagactgcaactagagaataaatattacattaaaattgctgctattttaaaacatagaatgtaactgtttgtattgtaaaagttgtgtgtcctcagtgaaaaatactgccttcagcttccaaagcaggcacctgaatgcctttttcttttctctctctcttctttctttaaatacatgccttcactagattgctgtgacctactaaacctcattttatttgcttggaacatttttggcttctctgtccacaccatagaaaaggacaaaggccttccagctctccttttctcttatttgttcccttctaaatacttgactctctgggggtgtgaaaagattcagctcataatttatactactattaattttgtggtccttctaagccaatttaaaattatacttttgtgtatatattttcaaaatctttgctactgactaccttagctttaaagttgctaatttggagatgactgatagaatccctgaaacttggtggaggggagtggaaaggagcagaatgtgtttgtgtatatgtatgtgaaacatggatcttctatatataaatattctttagaaaaagcgttcagtctttttacaattctaagtaaaacgtataggtcaacagaaattaaaggaatatttcttaaaattcatttatttttcttttttgaaagcagacagaagcaaggctagtatagtatgaatggtcaggtagtttaaatgcgttgtcccacgtggaacaggagatattaactgtttttaaagctttacattatttttttacaagaatttgttttcctgtaattttcttcacagttaaaatatcctaatttatattttaacaaaagagatgtaagatacatcaaatatagatgattcaaggtaatgttttttagacctgaaactattgattcaatttatcatcagtgtttatttctattgtatctagttatctatccaaataattgtattggcttagcggagactgtatgttaagtgtattagttttagattgtgaaattgtgcagtttaggtaaacatcaaatccctttatttttgtacagcagatttccagcattagaaccatgtagaacaaatatactagatgttaaagattacacaataaaggaacttggcaaaccaaaaaaaaaaaaaaaaaaa

SEQ ID NO: 2866 - DNA, 8075 bp, Homo sapiens
aatgtattatgatgtaggggagggaggaaggagggccagggtagggggcacaccctctccctgaatgaaattcatttaggggcactgtctgctcgcatgttctgttctgggagaaaatgggtagcagaagctacaatttgtactaagctaatgaaaagagagaaaagaagaatggggaagagaagggcaaagaaggcaaaaagagaagagaagaaaaagggaggagagagaaggagaaatgagaaaagaggaaaccaaatgaagaggatgtgtgagagaaaaaaatatgaaacagacctagaggatcaagacataatgggagcatttttagacaagccaaagatggaaaagcataatgcccaggggcagggtaatgggttgcgatatgggctaagcagcatgcaaggctggcgtgttgaaatggaggatgcacatacggctgtgatcggtttgccaagtggacttgaatcgtggtcattctttgctgtgtatgatgggcatgctggttctcaggttgccaaatactgctgtgagcatttgttagatcacatcaccaataaccaggattttaaagggtctgcaggagcaccttctgtggaaaatgtaaagaatggaatcagaacaggttttctggagattgatgaacacatgagagttatgtcagagaagaaacatggtgcagatagaagtgggtcaacagctgtaggtgtcttaatttctccccaacatacttatttcattaactgtggagactcaagaggtttactttgtaggaacaggaaagttcatttcttcacacaagatcacaaaccaagtaatccgctggagaaagaacgaattcagaatgcaggtggctctgtaatgattcagcgtgtgaatggctctctggctgtatcgagggcccttggggattttgattacaaatgtgtccatggaaaaggtcctactgagcagcttgtctcaccagagcctgaagtccatgatattgaaagatctgaagaagatgatcagttcattatccttgcatgtgatggtatctgggatgttatgggaaatgaagagctctgtgattttgtaagatccagacttgaagtcactgatgaccttgagaaagtttgcaatgaagtagtcgacacctgtttgtataagggaagtcgagacaacatgagtgtgattttgatctgttttccaaatgcacccaaagtatcgccagaagcagtgaagaaggaggcagagttggacaagtacctggaatgcagagtagaagaaatcataaagaagcagggggaaggcgtccccgacttagtccatgtgatgcgcacattagcgagtgagaacatccccagcctcccaccagggggtgaattggcaagcaagaggaatgttattgaagccgtttacaatagactgaatccttacaaaaatgacgacactgactctacatcaacagatgatatgtggtaaaactgctcatctagccatggagtttaccttcacctccaaaggagagtacagctcaactttgttgaaacttttaacatccatcctcaactttaaggaaggggatatgacatgggtgagaatgattacatcagagaacttcagcagtacaacagctagcccagaactgatttttttttttttttttgtaaatttgagacttatgtaagcgtgatttcaaaccataattcgtgttgtaaatcagactccagcaatttttgttgtatgattttgtttttttgtaaagtgtaattgtccttgtacaaaatgctcatatttaattatgaactgctttaaatcactatcaaagttacaagaaatgtttggcttattgtgtgatgcaacagatatatagccctttcaagtcatgttgtgtttggacttggggttggaacagggagagcagcagccatgtcagctacacgctcaaatgtgcagatgattatggaaaataacctcaaaatcttacaaagctgaacatccaaggagttattgaaaactatcttaaatgttcttggtaggggagttggcattgttgataaagccagtcccttcatttaactgtctttcaggatgttccttcgttgtttccatgagtattgcaggtaataatacagtgtattcataagaatctcaatcttggggctaaatgccttgtttctttgcacctcttttcaagtccttacatttaattactaattgataagcagcagcttcctacatatagtaggaaactgccacatttttgctatcatgattggctgggcctgctgctgttcctagtaagatattctgaattccattttatcaataaagcttgatttaacaaacaagaaacttaatcatgtatgtgtaattcctcttttaccctggccttttaaaacactgtgccgttgtaatgagacgtttctcatagggaaagatgttagtctcttttaattggacaacactgtcactcaaggcatagatgaaactttccttccattagaaagactaaaagatttaattcttggttgtaccttaatctattttttaaataggtttctttcaggctgcttatttttcattaagatgtgtatcagcttggatttgcctactgtttaattaaaatatttattgtcaaagtttgacaatctaacactctatggtaggggtgtgtgtgtgtgtgtttgtgagtgtgtgtttgcctgtgatttttaattggcccatgtctttagaatccaagtggttaagatgtatttgtgatttgaaatatagcatgttgataatatttagctgttggcctttacaaataactttcaaagcttaaggaattgtagatataaaaataacctaatttaatttaggcttaaattcctctgattaagcatgtgaaagtaagttttaaaatctgtcgcattgaaaagattactgttccgtgcccttctgtatttttgtctctttaggttgaatattgtatttatcaccatgtaatcattcagtaggcagattcccactagaaaactgttgaaatgtaagactaaaatacaacattgaatacaaaatcaaaattttgtgtataaaaaccagtatagtccattttgttatatttgttttttccctaacttggaaatatacatatttgtatatatagccttaaaattaatgtaaagttaggggagtagtggggaaagtaatgtgaaatgtctcagatttaagtagttaaataccagcaaaatcttttcattatccctcttattttgtgaggtgattaaatgtaacttaattgtatttaatttatatcttattccagcatgaatgaggaaaaactgaagtactatttatatttagaaattcatatcagttgaaattacagaaccaattccatacttacaataaatacttaatgtctaaatctgtggtagagtgcgaagtatgataatgttctaagttatggctttgcaagcatctaaatgtgcatttaatgaataccagtgcttctagtatagactaattaccagacatactggtactgaaagctaaatccctattataacaaaccagttccttaatattttaagtagactgacaactttagttccagaaattgcaaaactttgaactggactgtgtaatcttttgagatgcaaaacttaagtcacaagtagagtatgtgatggaaagctgtatttcaaaccataacagcatatttagagccttttttttttgagtctttaaacaagagaaaattaaaatattcctgtcaaaattattagtattgaaattaggcttggacacgagagagaaccgtatttgagtgatgtgagaagactaaatcttttccacatgagtcagcactgccatactaataatttttttactataaaaatacaggaaggaagtatacattataacagcagactgtgtgtgttcctgattcctggaggtaatagtggggggaaaccaaccatactttttaaaggcacttttgcacctctattgtgcacttcattcttgtaccacttaaattcttcacccccatcccctttttttgtgctaattagcatctcagggcaatgcctcaaaaatgtttgatgtgttctgttctttggagggaaaaagttcttatgtgatgataatatagtactcaaaatatacttttatcatttaaatgtcttatttgctgctatgaataggaaataacattttgtatagcaggctctgttttaccctaacattaaaaaatttcactgatctttctttcattaacagggtagaatctcctaatttccactttcttgggaatatacttttatagacaatagaagcagttctcaatattagcatatactttaaaaaatcaaagtgataacttaattcagctttggaagtatctcaaacatatttttactttatagtgcattaacttgcttctagagtacttaatgcaactgctctagccacttaattttttatactaatctcaacattaagaaatttggattaagtaataaattagttatgtaattcaagtaatctgaattacagcagtacttttagtgatcattcataggactatatattaacccagctaataactcagtttttttacaaaatgtttcgagtattattggtaaaacactgttctaggctaagcacattgggactgtaaagaaatgagtagatccttggcttcaagtttacatctggacaatttataatctagtgtatgttagtattataactggatcactcatcaaaaaatatatatatatatctattgcccacctgctatctaccaggtacttagctgatcaaggcaggcccctgccctaaagaccttgtttatacttcctttactcacctgaaaactgttctccagtttattttcttctctctaaagttaaagagtaattcagaagaaaattttgcttagcataagaataaaattggactgaagaggcttaagcccattcagtatccttgattgcatttatccaacggcctttattcttcctgctgacagcagtaactcagaggaataggtagtagatttctgaaaattatccagccatggaaatgtaggtggggtttgagtttaaggcatttaaaaatgtaaatatctctagctaaatttatcttaagtagaactctgtgtttttgtaacacactgccagtgttaatatcaaattttagccaaattattactatgtgttttaatattttaaaataatttcactgcccatctttactggacaaactcatttggagttcaacttgtgatttctgaaagaactgatgaaattgggtactgctttttttctccatttttcgttttgttttaattttgaatttcatggtatatacttttagttcaaactcagctgtttgtacagtattgtattaggatttggtattagaaaagatgtgtaaatatcttagtatataattgtttctcatttgaggtttttcttctaagggaccttaaagagttttatatacttttgctcacagaaactgctggtgagattaccattttttgagtatctagtcttctagtttttcttttaggcattaggaagccttctttagagttcaaaattttagaagcctaatttgctcttacttccttcaattatgtgccatgtgttttggtttgtatatgttttaaattgtatatttccttggaatatgcttgaaatatttaagaatacattttcaaaatgtataatactgtattgttttgttgatcagaataataagtctcagttaaatgtttgttattactgatagtcaaaatgctcaatagaaatgatgagaggcattggttccaattcattgtcaaatgaacgttttctaattttgttcacagattctttccctttcgattgttctgtatgttaagatagtggcttctgctctcactgttttcctatttatattactagcaggtaggagtgctaattagaaaaacttagatggtattgaaattacagttgacaacttatatttttatgagatggagaaaaaagattaagttgatataacaacaaagtggactttttttcttccttatcctgcacgaaatattgcccttgtttcctctactttcctcttggtgttttctctttttttcaaacagaaacaggccaattccattttcttgagcaagaaagcttagtgtgttacttcatcaaggccagctaatactgtgttaaaccgggctgaaaatgagaaaacttgggagatggaggaatggggaaatggcagtgggataggtagggaaggattactcttaattgttttaaaagccataggaaagtcttccttgtacgtggctgtaaatttataagaactattgtgtcacataaaccaacaagaatgaacctttgctgcttcagataatttgatttttccagcaaggaaattaataagttactgattcttcagcatagaaacaactgagaagaattaatgcaatgtttcttcactagaaaacccaacccttcatttcttttcattgctccaaaacccagttttcaactaatggttttctcattaaactaaatgtttagaaaagttgtttagagtttttctttttcttttacatagtcctcctgatccagtataagactatttagtaacgtgcatttgtatggtactatctaaagtaagttagattgatgtaagagatcgggtagctgcggaacaaaattagttatatcctaattaggtacagtgaatgacacaaaatcattttagcaatgcttcttaaccttttggggtcacaggcgttttgagactgatgaatcctagggacttatttacccaggaaaatgcgtatataacatacatatctccctaaagtttacaatattgtagtggttcatgggccccctggttaagagcccattctaaagtacaatagggcatcatcccttttcctgcaaagcccaaaagtatatttctagggcatgaaaataacttgagtctattttaaggaattgtttcactctagaggtagataggggacctggctagaatctgacattaaaatatactttttaaaaaatattatatttggggtggggaaagtgattaaaaggtgaaaaaaaaacatagtattcagaagttttggaggttaatgtctttctctaagatttgccactttagaaattcaacagaaaagaggtaaaacagaaatggaatgtatctggaacatttttggcctccatagtgcagatatactatattaacaagtaatacatttatttacctgtcagatctccaggttttaagattttgagctttctagtattaggattcattaaatgttcaattcatttcatattctaaggaattaggttatttacttactaattcaggatgttaaaataacatccaagtcggacaaccaccaccaatgcacacagttaatgagatttctaaaatataataagtacaatgtaacaaacgtatagaattttgcatttgttgccaaaattagatgtttaatgacagcttatttaattcccatttgtgggacttctggaacatagaaaccattatcttacctggttatcccttgactaaatagcatatctgcaggaaaatatcttgtttgtagtgatatgccccaatagtgattgatttcactcttgaaatgagttatatcacttaatttgtataaatgttatgagtggagagacatgtacatgttaaaagcatgttgcattatatattcattttttaaactctataaatgttaagaataatataattgcagaaatatttttcttaaatacaatgtgtaacaaaattctccgtagcaactcacccactttgcagtttatgtgatccacacttttaaagaaattccataaatgtatattttgtattatgtattatttcctggtccaaagaaaatatgtgaattcagttctaactttaagaatgtactgtttgttttcaagttcattgaaaaattgcattcagcctgcgaatggttgcagattgtatgttagatgaaaagtagaaataatttctagtttggaaaactggtgccactaaataaacaggcaattacataaaaaaaa

SEQ ID NO: 2867 - DNA, 2789 bp, Mus musculus
gggcgaggggcagcggtgtcgagagcgcgcgtgcgcggggccgcgctagaggcggcggcggtggcggcgctaggggcgggagcgcgcgcaggagctagaacgccgtggtctccgcgccggccgggtccgcagctcgggatcgggtggctggggcggggggaggggggcccaggcaggtggggcggaaagcgatgagtcctcggcgcctcctccgcctcccgcgggccccgctctctgcctcccgctccgacgcccggatgatctgagccgcgagggctccgagagccgggggcccggacccagcccggctcctcccctcctccgcccgggcccggccgccgtcgcgggaccccgtgcccggccgccgtcgccaccgccgccccggccgaccgagggacccgcccgcccgcggctgctccggacctagaggatcaagtcataatgggagcatttttagacaagccaaagatggagaagcataatgcccaggggcaggggaatgggttacgatacggcctaagcagcatgcaaggttggcgagttgaaatggaggacgcacacacggctgtgatcggtttgccaagtggacttgagacatggtcattctttgctgtatatgatgggcatgctggttctcaggttgccaaatactgctgtgagcacttgttagatcacatcaccaataaccaggatttcagaggatctgcaggagcaccttctgtggagaacgtaaagaatggaatcagaacagggtttctggagattgatgaacacatgagagttatgtcagagaagaaacatggtgcagatagaagcgggtcaacagctgtgggcgtcttaatctctccccaacatacttatttcattaactgtggagactcgagaggtttactttgtaggaatagaaaagttcacttcttcacacaagaccataaaccaagtaacccgctggaaaaagaacgaattcagaatgcagggggctcggtgatgattcagcgtgtcaatggctctctggctgtatcgagggcccttggggatttcgattacaaatgtgtccatggaaaaggtcccacagagcagcttgtctccccagagcccgaagtccatgatattgaaaggtctgaagaagatgaccagttcatcatccttgcatgcgatggcatctgggacgtcatggggaacgaagagctctgtgactttgtgagatccagacttgaagtcactgatgaccttgagaaagtttgcaatgaagtagtcgacacctgcttgtataagggaagtcgagacaacatgagtgtgattttgatctgttttccaagtgcacccaaagtctcggcagaggcggtgaagaaggaggcggagctggacaagtacctggagagcagagtagaagaaatcataaagaagcaggtggaaggcgtccctgacttagtccacgtgatgcgcacgttagccagtgagaacatccccagcctcccaccagggggtgaattggcaagcaagcggaatgtaattgaagccgtttacaatagactgaacccttacaaaaatgacgacactgattctgcgtcaaccgatgatatgtggtaaagccgctcacccagccgtggactcaccttcgcctgcaaaggggaagccagctcatccttgccgagcctttaccatccatcaccgacttcacaggagggtctgacacgggtgaggactgcagcttcagcgatggaacagctagcccagaatggattttctttttttattgtaaatttgagacttatgtaagcgtgatttcaaaccgtaattcatgttgtaaatcagactccagcaatttttgttgtatgattttggtttttgtaaagtgtaattgtccttgtacaaagtgctcatatttaattatgaactgctttaaaatcactatcagtgaatgataaaggaaatttggcttgttgtgtgacacaacagacatagtcatgctgtgtctggactcggttgggatagggaaagcggcagccacatagctgcatgctacgtgcacacgattaggaagaattccaaaagcttacacagctgtcacccaggctcatggaaactgtctctgttccggcgaggactggctcactgatacagccatcgctctcacctgtctctaggatgtcctctcctcgtagccaagatattgcagctgatcctgtatattcatgagagtatctatcaattttgggctaacatgccttgattctcttgcacctctttatgagttcttacatttaattactaattggtaagcagcagcttcctacacagtaggagactgccacatttttttcctatcatgactggctgggcctgctgctgttcctagtaagatattccgaattccattttatcaataaagcttggtttaacaaacaagacatgtaatcatgtatgcgtgattcctcggtcaccccggcttcagaccccactcggggagagaaagatgtcatgtttccttaaactggatgatggtgttagcatccaggtgcaggtggatcggaagattgacgtctgctgtctcctaatctgttttaattgcgtttcttccaggctgcttacttctcattaagatgtgtgtcagcttgactttacctactgttaattaaagtaattgtcaaagtttgacaaccctaaccctgtgatagatgtgtgtgtgttgaatgtgtgtttgcctgtaacttttaattgacccacgtctttagaatctaagaggttaagatacatttgtgatttgaaataaaagcatgttgataata

SEQ ID NO: 2868 - DNA, 20 bp, Artificial Sequence
  Description of Artificial Sequence: Synthetic oligonucleotide
  Description of Combined DNA/RNA Molecule: Synthetic oligonucleotide
gctgcttagcccatatcgca

SEQ ID NO: 2869 - DNA, 20 bp, Artificial Sequence
  Description of Artificial Sequence: Synthetic oligonucleotide
  Description of Combined DNA/RNA Molecule: Synthetic oligonucleotide
gccagccttgcatgctgctt

SEQ ID NO: 2870 - DNA, 20 bp, Artificial Sequence
  Description of Artificial Sequence: Synthetic oligonucleotide
  Description of Combined DNA/RNA Molecule: Synthetic oligonucleotide
acacgccagccttgcatgct

SEQ ID NO: 2871 - DNA, 20 bp, Artificial Sequence
  Description of Artificial Sequence: Synthetic oligonucleotide
  Description of Combined DNA/RNA Molecule: Synthetic oligonucleotide
tggcaaaccgatcacagccg

SEQ ID NO: 2872 - DNA, 20 bp, Artificial Sequence
  Description of Artificial Sequence: Synthetic oligonucleotide
  Description of Combined DNA/RNA Molecule: Synthetic oligonucleotide
acttggcaaaccgatcacag

SEQ ID NO: 2873 - DNA, 20 bp, Artificial Sequence
  Description of Artificial Sequence: Synthetic oligonucleotide
  Description of Combined DNA/RNA Molecule: Synthetic oligonucleotide
cacttggcaaaccgatcaca

SEQ ID NO: 2874 - DNA, 20 bp, Artificial Sequence
  Description of Artificial Sequence: Synthetic oligonucleotide
  Description of Combined DNA/RNA Molecule: Synthetic oligonucleotide
ccacttggcaaaccgatcac

SEQ ID NO: 2875 - DNA, 20 bp, Artificial Sequence
  Description of Artificial Sequence: Synthetic oligonucleotide
  Description of Combined DNA/RNA Molecule: Synthetic oligonucleotide
tccacttggcaaaccgatca

SEQ ID NO: 2876 - DNA, 20 bp, Artificial Sequence
  Description of Artificial Sequence: Synthetic oligonucleotide
  Description of Combined DNA/RNA Molecule: Synthetic oligonucleotide
gtccacttggcaaaccgatc

SEQ ID NO: 2877 - DNA, 20 bp, Artificial Sequence
  Description of Artificial Sequence: Synthetic oligonucleotide
  Description of Combined DNA/RNA Molecule: Synthetic oligonucleotide
agtccacttggcaaaccgat

SEQ ID NO: 2878 - DNA, 20 bp, Artificial Sequence
  Description of Artificial Sequence: Synthetic oligonucleotide
  Description of Combined DNA/RNA Molecule: Synthetic oligonucleotide
aagtccacttggcaaaccga

SEQ ID NO: 2879 - DNA, 20 bp, Artificial Sequence
  Description of Artificial Sequence: Synthetic oligonucleotide
  Description of Combined DNA/RNA Molecule: Synthetic oligonucleotide
caagtccacttggcaaaccg

SEQ ID NO: 2880 - DNA, 20 bp, Artificial Sequence
  Description of Artificial Sequence: Synthetic oligonucleotide
  Description of Combined DNA/RNA Molecule: Synthetic oligonucleotide
aagaatgaccacgattcaag

SEQ ID NO: 2881 - DNA, 20 bp, Artificial Sequence
  Description of Artificial Sequence: Synthetic oligonucleotide
  Description of Combined DNA/RNA Molecule: Synthetic oligonucleotide
gcccatcatacacagcaaag

SEQ ID NO: 2882 - DNA, 20 bp, Artificial Sequence
  Description of Artificial Sequence: Synthetic oligonucleotide
  Description of Combined DNA/RNA Molecule: Synthetic oligonucleotide
atgcccatcatacacagcaa

SEQ ID NO: 2883 - DNA, 20 bp, Artificial Sequence
  Description of Artificial Sequence: Synthetic oligonucleotide
  Description of Combined DNA/RNA Molecule: Synthetic oligonucleotide
gcatgcccatcatacacagc

SEQ ID NO: 2884 - DNA, 20 bp, Artificial Sequence
  Description of Artificial Sequence: Synthetic oligonucleotide
  Description of Combined DNA/RNA Molecule: Synthetic oligonucleotide
cagcatgcccatcatacaca

SEQ ID NO: 2885 - DNA, 20 bp, Artificial Sequence
  Description of Artificial Sequence: Synthetic oligonucleotide
  Description of Combined DNA/RNA Molecule: Synthetic oligonucleotide
accagcatgcccatcataca

SEQ ID NO: 2886 - DNA, 20 bp, Artificial Sequence
  Description of Artificial Sequence: Synthetic oligonucleotide
  Description of Combined DNA/RNA Molecule: Synthetic oligonucleotide
gaaccagcatgcccatcata

SEQ ID NO: 2887 - DNA, 20 bp, Artificial Sequence
  Description of Artificial Sequence: Synthetic oligonucleotide
  Description of Combined DNA/RNA Molecule: Synthetic oligonucleotide
tgagaaccagcatgcccatc

SEQ ID NO: 2888 - DNA, 20 bp, Artificial Sequence
  Description of Artificial Sequence: Synthetic oligonucleotide
  Description of Combined DNA/RNA Molecule: Synthetic oligonucleotide
ctgagaaccagcatgcccat

SEQ ID NO: 2889 - DNA, 20 bp, Artificial Sequence
  Description of Artificial Sequence: Synthetic oligonucleotide
  Description of Combined DNA/RNA Molecule: Synthetic oligonucleotide
cctggttattggtgatgtga

SEQ ID NO: 2890 - DNA, 20 bp, Artificial Sequence
  Description of Artificial Sequence: Synthetic oligonucleotide
  Description of Combined DNA/RNA Molecule: Synthetic oligonucleotide
tcctggttattggtgatgtg

SEQ ID NO: 2891 - DNA, 20 bp, Artificial Sequence
  Description of Artificial Sequence: Synthetic oligonucleotide
  Description of Combined DNA/RNA Molecule: Synthetic oligonucleotide
catgtgttcatcaatctcca

SEQ ID NO: 2892 - DNA, 20 bp, Artificial Sequence
  Description of Artificial Sequence: Synthetic oligonucleotide
  Description of Combined DNA/RNA Molecule: Synthetic oligonucleotide
tcatgtgttcatcaatctcc

SEQ ID NO: 2893 - DNA, 20 bp, Artificial Sequence
  Description of Artificial Sequence: Synthetic oligonucleotide
  Description of Combined DNA/RNA Molecule: Synthetic oligonucleotide
tctccacagttaatgaaata

SEQ ID NO: 2894 - DNA, 20 bp, Artificial Sequence
  Description of Artificial Sequence: Synthetic oligonucleotide
  Description of Combined DNA/RNA Molecule: Synthetic oligonucleotide
ttgagtctccacagttaatg

SEQ ID NO: 2895 - DNA, 20 bp, Artificial Sequence
  Description of Artificial Sequence: Synthetic oligonucleotide
  Description of Combined DNA/RNA Molecule: Synthetic oligonucleotide
acctcttgagtctccacagt

SEQ ID NO: 2896 - DNA, 20 bp, Artificial Sequence
  Description of Artificial Sequence: Synthetic oligonucleotide
  Description of Combined DNA/RNA Molecule: Synthetic oligonucleotide
agtaaacctcttgagtctcc

SEQ ID NO: 2897 - DNA, 20 bp, Artificial Sequence
  Description of Artificial Sequence: Synthetic oligonucleotide
  Description of Combined DNA/RNA Molecule: Synthetic oligonucleotide
tacaaagtaaacctcttgag

SEQ ID NO: 2898 - DNA, 20 bp, Artificial Sequence
  Description of Artificial Sequence: Synthetic oligonucleotide
  Description of Combined DNA/RNA Molecule: Synthetic oligonucleotide
attacttggtttgtgatctt

SEQ ID NO: 2899 - DNA, 20 bp, Artificial Sequence
  Description of Artificial Sequence: Synthetic oligonucleotide
  Description of Combined DNA/RNA Molecule: Synthetic oligonucleotide
agcggattacttggtttgtg

SEQ ID NO: 2900 - DNA, 20 bp, Artificial Sequence
  Description of Artificial Sequence: Synthetic oligonucleotide
  Description of Combined DNA/RNA Molecule: Synthetic oligonucleotide
tctccagcggattacttggt

SEQ ID NO: 2901 - DNA, 20 bp, Artificial Sequence
  Description of Artificial Sequence: Synthetic oligonucleotide
  Description of Combined DNA/RNA Molecule: Synthetic oligonucleotide
ttctttctccagcggattac

SEQ ID NO: 2902 - DNA, 20 bp, Artificial Sequence
  Description of Artificial Sequence: Synthetic oligonucleotide
  Description of Combined DNA/RNA Molecule: Synthetic oligonucleotide
tctgaattcgttctttctcc

SEQ ID NO: 2903 - DNA, 20 bp, Artificial Sequence
  Description of Artificial Sequence: Synthetic oligonucleotide
  Description of Combined DNA/RNA Molecule: Synthetic oligonucleotide
gccattcacacgctgaatca

SEQ ID NO: 2904 - DNA, 20 bp, Artificial Sequence
  Description of Artificial Sequence: Synthetic oligonucleotide
  Description of Combined DNA/RNA Molecule: Synthetic oligonucleotide
agagagccattcacacgctg

SEQ ID NO: 2905 - DNA, 20 bp, Artificial Sequence
  Description of Artificial Sequence: Synthetic oligonucleotide
  Description of Combined DNA/RNA Molecule: Synthetic oligonucleotide
agccagagagccattcacac

SEQ ID NO: 2906 - DNA, 20 bp, Artificial Sequence
  Description of Artificial Sequence: Synthetic oligonucleotide
  Description of Combined DNA/RNA Molecule: Synthetic oligonucleotide
cgatacagccagagagccat

SEQ ID NO: 2907 - DNA, 20 bp, Artificial Sequence
  Description of Artificial Sequence: Synthetic oligonucleotide
  Description of Combined DNA/RNA Molecule: Synthetic oligonucleotide
gccctcgatacagccagaga

SEQ ID NO: 2908 - DNA, 20 bp, Artificial Sequence
  Description of Artificial Sequence: Synthetic oligonucleotide
  Description of Combined DNA/RNA Molecule: Synthetic oligonucleotide
gctgctcagtaggacctttt

SEQ ID NO: 2909 - DNA, 20 bp, Artificial Sequence
  Description of Artificial Sequence: Synthetic oligonucleotide
  Description of Combined DNA/RNA Molecule: Synthetic oligonucleotide
tgcttctggcgatactttgg

SEQ ID NO: 2910 - DNA, 20 bp, Artificial Sequence
  Description of Artificial Sequence: Synthetic oligonucleotide
  Description of Combined DNA/RNA Molecule: Synthetic oligonucleotide
ttcactgcttctggcgatac

SEQ ID NO: 2911 - DNA, 20 bp, Artificial Sequence
  Description of Artificial Sequence: Synthetic oligonucleotide
  Description of Combined DNA/RNA Molecule: Synthetic oligonucleotide
ccttcttcactgcttctggc

SEQ ID NO: 2912 - DNA, 20 bp, Artificial Sequence
  Description of Artificial Sequence: Synthetic oligonucleotide
  Description of Combined DNA/RNA Molecule: Synthetic oligonucleotide
tctgcctccttcttcactgc

SEQ ID NO: 2913 - DNA, 20 bp, Artificial Sequence
  Description of Artificial Sequence: Synthetic oligonucleotide
  Description of Combined DNA/RNA Molecule: Synthetic oligonucleotide
tgtccaactctgcctccttc

SEQ ID NO: 2914 - DNA, 20 bp, Artificial Sequence
  Description of Artificial Sequence: Synthetic oligonucleotide
  Description of Combined DNA/RNA Molecule: Synthetic oligonucleotide
gcugcttagcccataucgca

SEQ ID NO: 2915 - DNA, 20 bp, Artificial Sequence
  Description of Artificial Sequence: Synthetic oligonucleotide
  Description of Combined DNA/RNA Molecule: Synthetic oligonucleotide
gccagccttgcatgcugcuu

SEQ ID NO: 2916 - DNA, 20 bp, Artificial Sequence
  Description of Artificial Sequence: Synthetic oligonucleotide
  Description of Combined DNA/RNA Molecule: Synthetic oligonucleotide
acacgccagccttgcaugcu

SEQ ID NO: 2917 - DNA, 20 bp, Artificial Sequence
  Description of Artificial Sequence: Synthetic oligonucleotide
  Description of Combined DNA/RNA Molecule: Synthetic oligonucleotide
uggcaaaccgatcacagccg

SEQ ID NO: 2918 - DNA, 20 bp, Artificial Sequence
  Description of Artificial Sequence: Synthetic oligonucleotide
  Description of Combined DNA/RNA Molecule: Synthetic oligonucleotide
acuuggcaaaccgatcacag

SEQ ID NO: 2919 - DNA, 20 bp, Artificial Sequence
  Description of Artificial Sequence: Synthetic oligonucleotide
  Description of Combined DNA/RNA Molecule: Synthetic oligonucleotide
cacuuggcaaaccgaucaca

SEQ ID NO: 2920 - DNA, 20 bp, Artificial Sequence
  Description of Artificial Sequence: Synthetic oligonucleotide
  Description of Combined DNA/RNA Molecule: Synthetic oligonucleotide
ccacutggcaaaccgaucac

SEQ ID NO: 2921 - DNA, 20 bp, Artificial Sequence
  Description of Artificial Sequence: Synthetic oligonucleotide
  Description of Combined DNA/RNA Molecule: Synthetic oligonucleotide
uccacttggcaaaccgauca

SEQ ID NO: 2922 - DNA, 20 bp, Artificial Sequence
  Description of Artificial Sequence: Synthetic oligonucleotide
  Description of Combined DNA/RNA Molecule: Synthetic oligonucleotide
guccacttggcaaaccgauc

SEQ ID NO: 2923 - DNA, 20 bp, Artificial Sequence
  Description of Artificial Sequence: Synthetic oligonucleotide
  Description of Combined DNA/RNA Molecule: Synthetic oligonucleotide
aguccacttggcaaaccgau

SEQ ID NO: 2924 - DNA, 20 bp, Artificial Sequence
  Description of Artificial Sequence: Synthetic oligonucleotide
  Description of Combined DNA/RNA Molecule: Synthetic oligonucleotide
aaguccacttggcaaaccga

SEQ ID NO: 2925 - DNA, 20 bp, Artificial Sequence
  Description of Artificial Sequence: Synthetic oligonucleotide
  Description of Combined DNA/RNA Molecule: Synthetic oligonucleotide
caaguccacttggcaaaccg

SEQ ID NO: 2926 - DNA, 20 bp, Artificial Sequence
  Description of Artificial Sequence: Synthetic oligonucleotide
  Description of Combined DNA/RNA Molecule: Synthetic oligonucleotide
aagaatgaccacgatucaag

SEQ ID NO: 2927 - DNA, 20 bp, Artificial Sequence
  Description of Artificial Sequence: Synthetic oligonucleotide
  Description of Combined DNA/RNA Molecule: Synthetic oligonucleotide
gcccatcatacacagcaaag

SEQ ID NO: 2928 - DNA, 20 bp, Artificial Sequence
  Description of Artificial Sequence: Synthetic oligonucleotide
  Description of Combined DNA/RNA Molecule: Synthetic oligonucleotide
augcccatcatacacagcaa

SEQ ID NO: 2929 - DNA, 20 bp, Artificial Sequence
  Description of Artificial Sequence: Synthetic oligonucleotide
  Description of Combined DNA/RNA Molecule: Synthetic oligonucleotide
gcaugcccatcatacacagc

SEQ ID NO: 2930 - DNA, 20 bp, Artificial Sequence
  Description of Artificial Sequence: Synthetic oligonucleotide
  Description of Combined DNA/RNA Molecule: Synthetic oligonucleotide
cagcatgcccatcatacaca

SEQ ID NO: 2931 - DNA, 20 bp, Artificial Sequence
  Description of Artificial Sequence: Synthetic oligonucleotide
  Description of Combined DNA/RNA Molecule: Synthetic oligonucleotide
accagcatgcccatcauaca

SEQ ID NO: 2932 - DNA, 20 bp, Artificial Sequence
  Description of Artificial Sequence: Synthetic oligonucleotide
  Description of Combined DNA/RNA Molecule: Synthetic oligonucleotide
gaaccagcatgcccaucaua

SEQ ID NO: 2933 - DNA, 20 bp, Artificial Sequence
  Description of Artificial Sequence: Synthetic oligonucleotide
  Description of Combined DNA/RNA Molecule: Synthetic oligonucleotide
ugagaaccagcatgcccauc

SEQ ID NO: 2934 - DNA, 20 bp, Artificial Sequence
  Description of Artificial Sequence: Synthetic oligonucleotide
  Description of Combined DNA/RNA Molecule: Synthetic oligonucleotide
cugagaaccagcatgcccau

SEQ ID NO: 2935 - DNA, 20 bp, Artificial Sequence
  Description of Artificial Sequence: Synthetic oligonucleotide
  Description of Combined DNA/RNA Molecule: Synthetic oligonucleotide
cctggttattggtgatgtga

SEQ ID NO: 2936 - DNA, 20 bp, Artificial Sequence
  Description of Artificial Sequence: Synthetic oligonucleotide
  Description of Combined DNA/RNA Molecule: Synthetic oligonucleotide
uccuggttattggtgaugug

SEQ ID NO: 2937 - DNA, 20 bp, Artificial Sequence
  Description of Artificial Sequence: Synthetic oligonucleotide
  Description of Combined DNA/RNA Molecule: Synthetic oligonucleotide
caugugttcatcaatcucca

SEQ ID NO: 2938 - DNA, 20 bp, Artificial Sequence
  Description of Artificial Sequence: Synthetic oligonucleotide
  Description of Combined DNA/RNA Molecule: Synthetic oligonucleotide
ucaugtgttcatcaaucucc

SEQ ID NO: 2939 - DNA, 20 bp, Artificial Sequence
  Description of Artificial Sequence: Synthetic oligonucleotide
  Description of Combined DNA/RNA Molecule: Synthetic oligonucleotide
ucuccacagttaatgaaaua

SEQ ID NO: 2940 - DNA, 20 bp, Artificial Sequence
  Description of Artificial Sequence: Synthetic oligonucleotide
  Description of Combined DNA/RNA Molecule: Synthetic oligonucleotide
uugagtctccacagtuaaug

SEQ ID NO: 2941 - DNA, 20 bp, Artificial Sequence
  Description of Artificial Sequence: Synthetic oligonucleotide
  Description of Combined DNA/RNA Molecule: Synthetic oligonucleotide
accucttgagtctccacagu

SEQ ID NO: 2942 - DNA, 20 bp, Artificial Sequence
  Description of Artificial Sequence: Synthetic oligonucleotide
  Description of Combined DNA/RNA Molecule: Synthetic oligonucleotide
aguaaacctcttgagucucc

SEQ ID NO: 2943 - DNA, 20 bp, Artificial Sequence
  Description of Artificial Sequence: Synthetic oligonucleotide
  Description of Combined DNA/RNA Molecule: Synthetic oligonucleotide
uacaaagtaaacctcuugag

SEQ ID NO: 2944 - DNA, 20 bp, Artificial Sequence
  Description of Artificial Sequence: Synthetic oligonucleotide
  Description of Combined DNA/RNA Molecule: Synthetic oligonucleotide
auuacttggtttgtgaucuu

SEQ ID NO: 2945 - DNA, 20 bp, Artificial Sequence
  Description of Artificial Sequence: Synthetic oligonucleotide
  Description of Combined DNA/RNA Molecule: Synthetic oligonucleotide
agcggattacttggtuugug

SEQ ID NO: 2946 - DNA, 20 bp, Artificial Sequence
  Description of Artificial Sequence: Synthetic oligonucleotide
  Description of Combined DNA/RNA Molecule: Synthetic oligonucleotide
ucuccagcggattacuuggu

SEQ ID NO: 2947 - DNA, 20 bp, Artificial Sequence
  Description of Artificial Sequence: Synthetic oligonucleotide
  Description of Combined DNA/RNA Molecule: Synthetic oligonucleotide
uucuutctccagcggauuac

SEQ ID NO: 2948 - DNA, 20 bp, Artificial Sequence
  Description of Artificial Sequence: Synthetic oligonucleotide
  Description of Combined DNA/RNA Molecule: Synthetic oligonucleotide
ucugaattcgttcttucucc

SEQ ID NO: 2949 - DNA, 20 bp, Artificial Sequence
  Description of Artificial Sequence: Synthetic oligonucleotide
  Description of Combined DNA/RNA Molecule: Synthetic oligonucleotide
gccautcacacgctgaauca

SEQ ID NO: 2950 - DNA, 20 bp, Artificial Sequence
  Description of Artificial Sequence: Synthetic oligonucleotide
  Description of Combined DNA/RNA Molecule: Synthetic oligonucleotide
agagagccattcacacgcug

SEQ ID NO: 2951 - DNA, 20 bp, Artificial Sequence
  Description of Artificial Sequence: Synthetic oligonucleotide
  Description of Combined DNA/RNA Molecule: Synthetic oligonucleotide
agccagagagccattcacac

SEQ ID NO: 2952 - DNA, 20 bp, Artificial Sequence
  Description of Artificial Sequence: Synthetic oligonucleotide
  Description of Combined DNA/RNA Molecule: Synthetic oligonucleotide
cgauacagccagagagccau

SEQ ID NO: 2953 - DNA, 20 bp, Artificial Sequence
  Description of Artificial Sequence: Synthetic oligonucleotide
  Description of Combined DNA/RNA Molecule: Synthetic oligonucleotide
gcccucgatacagccagaga

SEQ ID NO: 2954 - DNA, 20 bp, Artificial Sequence
  Description of Artificial Sequence: Synthetic oligonucleotide
  Description of Combined DNA/RNA Molecule: Synthetic oligonucleotide
gcugctcagtaggaccuuuu

SEQ ID NO: 2955 - DNA, 20 bp, Artificial Sequence
  Description of Artificial Sequence: Synthetic oligonucleotide
  Description of Combined DNA/RNA Molecule: Synthetic oligonucleotide
ugcuuctggcgatacuuugg

SEQ ID NO: 2956 - DNA, 20 bp, Artificial Sequence
  Description of Artificial Sequence: Synthetic oligonucleotide
  Description of Combined DNA/RNA Molecule: Synthetic oligonucleotide
uucagtgcttctggcgauac

SEQ ID NO: 2957 - DNA, 20 bp, Artificial Sequence
  Description of Artificial Sequence: Synthetic oligonucleotide
  Description of Combined DNA/RNA Molecule: Synthetic oligonucleotide
ccuucttcactgcttcuggc

SEQ ID NO: 2958 - DNA, 20 bp, Artificial Sequence
  Description of Artificial Sequence: Synthetic oligonucleotide
  Description of Combined DNA/RNA Molecule: Synthetic oligonucleotide
ucugcctccttcttcacugc

SEQ ID NO: 2959 - DNA, 20 bp, Artificial Sequence
  Description of Artificial Sequence: Synthetic oligonucleotide
  Description of Combined DNA/RNA Molecule: Synthetic oligonucleotide
uguccaactctgcctccuuc

What is claimed is:

1. A compound comprising an oligonucleotide comprising linked nucleosides with a nucleobase sequence that is at least 90% complementary to an equal length portion of a transcript that is transcribed from at least nucleotide 41,932 to nucleotide 42,787 and from nucleotide 44,874 to nucleotide 44,990 of SEQ ID NO: 1, wherein at least one nucleoside linkage of the linked nucleosides is a non-natural linkage.

2. An oligonucleotide comprising linked nucleosides with a nucleobase sequence that is at least 90% complementary to an equal length portion of a transcript that is transcribed from at least nucleotide 41,932 to nucleotide 42,787 and from nucleotide 44,874 to nucleotide 44,990 of SEQ ID NO: 1, wherein at least one nucleoside linkage of the linked nucleosides is a non-natural linkage.

3. The oligonucleotide of claim 1 or 2, wherein the transcript transcribed from nucleotide 41,932 to nucleotide 42,787 and from nucleotide 44,874 to nucleotide 44,990 of SEQ ID NO: 1 comprises a sequence of any of SEQ ID NO: 2864, SEQ ID NO: 2865, or SEQ ID NO: 2866.

4. A compound comprising an oligonucleotide comprising linked nucleosides with a nucleobase sequence that is at least 90% complementary to an equal length portion of a transcript that shares at least 90% identity to SEQ ID NO: 2864, SEQ ID NO: 2865, or SEQ ID NO: 2866, or to a contiguous 15 to 50 nucleobase portion of SEQ ID NO: 2864, SEQ ID NO: 2865, or SEQ ID NO: 2866, wherein at least one nucleoside linkage of the linked nucleosides is a non-natural linkage.

5. An oligonucleotide comprising linked nucleosides with a nucleobase sequence that is at least 90% complementary to an equal length portion of a transcript that shares at least 90% identity to SEQ ID NO: 2864, SEQ ID NO: 2865, or SEQ ID NO: 2866, or to a contiguous 15 to 50 nucleobase portion of SEQ ID NO: 2864, SEQ ID NO: 2865, or SEQ ID NO: 2866, wherein at least one nucleoside linkage of the linked nucleosides is a non-natural linkage.

6. The oligonucleotide of claims 4 or 5, wherein the nucleobase sequence comprises a portion of at least 10 contiguous nucleobases that shares at least 90% identity with an equal length portion of any one of SEQ ID NOs: 2-955, SEQ ID NOs: 1910-2863, SEQ ID NOs: 2868-2913, and SEQ ID NOs: 2914-2959.

7. The oligonucleotide of any one of claims 4-6, wherein the nucleobase sequence comprises a portion of at least 11, 12, 13, 14, 15, 16, 17, 18, 19, or 20 contiguous nucleobases that shares at least 90% identity with an equal length portion of any one of SEQ ID NOs: 2-955, SEQ ID NOs: 1910-2863, SEQ ID NOs: 2868-2913, and SEQ ID NOs: 2914-2959.

8. The oligonucleotide of any one of claims 4-6, wherein the nucleobase sequence comprises a portion of at least 10 contiguous nucleobases that shares at least 90% identity with an equal length portion of any one of SEQ ID NOs: 2868-2913 and SEQ ID NOs: 2914-2959.

9. The oligonucleotide of any one of claims 4-6, wherein the nucleobase sequence comprises a portion of at least 11, 12, 13, 14, 15, 16, 17, 18, 19, or 20 contiguous nucleobases that shares at least 90% identity with an equal length portion of any one of SEQ ID NOs: 2868-2913 and SEQ ID NOs: 2914-2959.

10. The oligonucleotide of claim 4 or 5, wherein the nucleobase sequence comprises a portion of at least 10 contiguous nucleobases that is at least 90% complementary to an equal length portion of nucleobases within any one of positions 457-1410 of SEQ ID NO: 2864.

11. The oligonucleotide of any one of claims 4-5 or 10, wherein the nucleobase sequence comprises a portion of at least 11, 12, 13, 14, 15, 16, 17, 18, 19, or 20 contiguous nucleobases that is at least 90% complementary to an equal length portion of nucleobases within any one of positions 457-1410 of SEQ ID NO: 2864.

12. The oligonucleotide of any one of claims 4-5 or 10, wherein the nucleobase sequence comprises a portion of at least 10 contiguous nucleobases that is at least 90% complementary to an equal length portion of nucleobases within any one of positions 542-814, 895-1006, 1025-1117, or 1361-1407 of SEQ ID NO: 2864.

13. The oligonucleotide of any one of claims 10-12, wherein the nucleobase sequence comprises a portion of at least 11, 12, 13, 14, 15, 16, 17, 18, 19, or 20 contiguous nucleobases that is at least 90% complementary to an equal length portion of nucleobases within any one of positions 542-814, 895-1006, 1025-1117, or 1361-1407 of SEQ ID NO: 2864.

14. The oligonucleotide of claim 10 or 12, wherein the nucleobase sequence comprises a portion of at least 10 contiguous nucleobases that is at least 90% complementary to an equal length portion of nucleobases within any one of positions 542-561, 555-574, 559-578, 599-618, 602-621, 603-622, 604-623, 605-624, 606-625, 607-626, 608-627, 609-628, 625-644, 642-661, 644-663, 646-665, 648-667, 650-669, 652-671, 655-674, 656-675, 708-727, 709-728, 794-813, 795-814, 895-914, 900-919, 905-924, 910-929, 915-934, 962-981, 967-986, 972-991, 977-996, 987-1006, 1025-1044, 1030-1049, 1034-1053, 1040-1059, 1045-1064, 1098-1117, 1361-1380, 1366-1385, 1371-1390, 1378-1397, and 1386-1405 of SEQ ID NO: 2864.

15. The oligonucleotide of any one of claims 10-14, wherein the nucleobase sequence comprises a portion of at least 11, 12, 13, 14, 15, 16, 17, 18, 19, or 20 contiguous nucleobases that is at least 90% complementary to an equal length portion of nucleobases within any one of positions 542-561, 555-574, 559-578, 599-618, 602-621, 603-622, 604-623, 605-624, 606-625, 607-626, 608-627, 609-628, 625-644, 642-661, 644-663, 646-665, 648-667, 650-669, 652-671, 655-674, 656-675, 708-727, 709-728, 794-813, 795-814, 895-914, 900-919, 905-924, 910-929, 915-934, 962-981, 967-986, 972-991, 977-996, 987-1006, 1025-1044, 1030-1049, 1034-1053, 1040-1059, 1045-1064, 1098-1117, 1361-1380, 1366-1385, 1371-1390, 1378-1397, and 1386-1405 of SEQ ID NO: 2864.

16. The oligonucleotide of any one claims 1-15, wherein the oligonucleotide comprises at least one nucleoside linkage selected from the group consisting of a phosphodiester linkage, a phosphorothioate linkage, an alkyl phosphate linkage, an alkylphosphonate linkage, a 3-methoxypropyl phosphonate linkage, a phosphorodithioate linkage, a phosphotriester linkage, a methylphosphonate linkage, an aminoalkylphosphotriester linkage, an alkylene phosphonate linkage, a phosphinate linkage, a phosphoramidate linkage, a phosphoramidothioate linkage, a phosphorodiamidate (e.g., comprising a phosphorodiamidate morpholino (PMO), 3′ amino ribose, or 5′ amino ribose) linkage, an aminoalkylphosphoramidate linkage, a thiophosphoramidate linkage, a thionoalkylphosphonate linkage, a thionoalkylphosphotriester linkage, a thiophosphate linkage, a selenophosphate linkage, and a boranophosphate linkage, or any combination(s) thereof.

17. The oligonucleotide of any one of the preceding claims, wherein at least one internucleoside linkage of the nucleotide sequence is a phosphorothioate linkage.

18. The oligonucleotide of claim 17, wherein the phosphorothioate internucleoside linkage is in one of a Rp configuration or a Sp configuration.

19. The oligonucleotide of any one of claims 1-18, wherein the oligonucleotide comprises one or more chiral centers and/or double bonds.

20. The oligonucleotide of claim 19, wherein the oligonucleotide exist as stereoisomers selected from geometric isomers, enantiomers, and diastereomers.

21. The oligonucleotide of any one of the preceding claims, wherein all internucleoside linkages of the nucleotide sequence are phosphorothioate linkages.

22. The oligonucleotide of any one of the preceding claims, wherein the oligonucleotide comprises at least one modified nucleobase.

23. The oligonucleotide of claim 22, wherein the at least one modified nucleobase is 5-methylcytosine, pseudouridine, or 5-methoxyuridine.

24. The oligonucleotide of any one of the preceding claims, wherein the oligonucleotide comprises at least one nucleoside with a modified sugar moiety.

25. The oligonucleotide of claim 24, wherein the modified sugar moiety is one of a 2′-OMe modified sugar moiety, bicyclic sugar moiety, 2′-O-(2-methoxyethyl) (2′MOE), 2′-deoxy-2′-fluoro nucleoside, 2′-fluoro-β-D-arabinonucleoside, locked nucleic acid (LNA), constrained ethyl 2′-4′-bridged nucleic acid (cEt), S-cEt, hexitol nucleic acids (HNA), and tricyclic analog (e.g., tcDNA).

26. The oligonucleotide of any one of the preceding claims, wherein the oligonucleotide comprises two, three, four, five, six, seven, eight, nine, or ten nucleosides with modified sugar moieties.

27. The oligonucleotide of claim 26, wherein the modified sugar moieties are independently any one of a 2′-OMe modified sugar moiety, bicyclic sugar moiety, 2′-O-(2-methoxyethyl) (2′MOE), 2′-deoxy-2′-fluoro nucleoside, 2′-fluoro-β-D-arabinonucleoside, locked nucleic acid (LNA), constrained ethyl 2′-4′-bridged nucleic acid (cEt), S-cEt, hexitol nucleic acids (HNA), and tricyclic analog (e.g., tcDNA).

28. The oligonucleotide of any one of the preceding claims, wherein the oligonucleotide comprises ten 2′-O-(2-methoxyethyl) (2′MOE) nucleosides.

29. The oligonucleotide of claim 28, wherein five of the 2′-O-(2-methoxyethyl) (2′MOE) nucleosides are located at the 3′ end of the oligonucleotide, and wherein five of the 2′-O-(2-methoxyethyl) (2′MOE) nucleosides are located at the 5′ end of the oligonucleotide.

30. The oligonucleotide of any one of claims 24-29, wherein the at least one nucleoside with the modified sugar moiety or the nucleosides with modified sugar moieties are ribonucleosides.

31. The oligonucleotide of any one of the preceding claims, wherein the oligonucleotide comprises at least one deoxyribonucleoside.

32. The oligonucleotide of any one of the preceding claims, wherein the oligonucleotide comprises two, three, four, five, six, seven, eight, nine, or ten deoxyribonucleosides.

33. The oligonucleotide of any one of claims 1-17, wherein the oligonucleotide comprises:
e. a gap segment comprising one or more of linked deoxyribonucleosides, 2′-Fluoro Arabino Nucleic Acids (FANA), and Fluoro Cyclohexenyl nucleic acid (F-CeNA);
f. a 5′ wing region comprising linked nucleosides; and
g. a 3′ wing region comprising linked nucleosides;
h. wherein the central region comprises a region of at least 8 contiguous nucleobases having at least 80% identity to an equal length portion of any one of SEQ ID NOs: 2-955, SEQ ID NOs: 1910-2863, or SEQ ID NOs: 2868-2959 positioned between the 5′ wing segment and the 3′ wing segment; wherein the 5′ wing region and the 3′ wing region each comprises at least two linked nucleosides; and wherein at least one nucleoside of each wing region comprises a modified sugar.

34. The oligonucleotide of claim 33, wherein the at least two linked nucleosides of the 5′ wing region are linked through a phosphorothioate internucleoside linkage and/or wherein the at least two linked nucleosides of the 3′ wing region are independently linked through a phosphorothioate internucleoside linkage.

35. The oligonucleotide of claim 33 or 34, wherein every internucleoside linkage of the 5′ wing region and/or every internucleoside linkage of the 3′ wing region, independently are phosphorothioate internucleoside linkages.

36. The oligonucleotide of claim 33 or 34, wherein the 5′ wing region further comprises at least one phosphodiester internucleoside linkage.

37. The oligonucleotide of claim 33 or 34, wherein the 3′ wing region further comprises at least one phosphodiester internucleoside linkage.

38. The oligonucleotide of claim 33, wherein the at least two linked nucleosides of the 5′ wing region are linked through a phosphodiester internucleoside linkage and/or wherein the at least two linked nucleosides of the 3′ wing region are independently linked through a phosphodiester internucleoside linkage.

39. The oligonucleotide of any one of claims 33-38, wherein at least one of the internucleoside linkages of the central region is a phosphodiester linkage.

40. The oligonucleotide of claim 39, wherein at least two, at least three, at least four, at least five, at least six, at least seven, at least eight, or at least nine of the internucleoside linkages of the central region are phosphodiester linkages.

41. The oligonucleotide of any one of claims 33-38, wherein at least one of the internucleoside linkages of the central region is a phosphorothioate internucleoside linkage.

42. The oligonucleotide of claim 41, wherein at least two, at least three, at least four, at least five, at least six, at least seven, at least eight, or at least nine of the internucleoside linkages of the central region are phosphorothioate internucleoside linkages.

43. The oligonucleotide of any one of claims 33-34 or 41-42, wherein all internucleoside linkages of the oligonucleotide are phosphorothioate internucleoside linkages.

44. The oligonucleotide of any one of claims 33-43, wherein any one or all of the phosphorothioate internucleoside linkages are in a Rp configuration, a Sp configuration, or in any combination of Rp and Sp configuration.

45. The oligonucleotide of any one of claims 33-44, wherein the oligonucleotide comprises at least one modified sugar moiety.

46. The oligonucleotide of claim 45, wherein the 5′ wing region or the 3′ wing region comprises the at least one modified sugar moiety.

47. The oligonucleotide of claim 45, wherein the central region comprises the at least one modified sugar moiety.

48. The oligonucleotide of any one of claims 45-47, wherein the at least one modified sugar moiety is any one of a 2′-OMe modified sugar moiety, bicyclic sugar moiety, 2′-O-(2-methoxyethyl) (2′MOE), 2′-deoxy-2′-fluoro nucleoside, 2′-fluoro-β-D-arabinonucleoside, locked nucleic acid (LNA), constrained ethyl 2′-4′-bridged nucleic acid (cEt), S-cEt, tcDNA, hexitol nucleic acids (HNA), and tricyclic analog (e.g., tcDNA).

49. The oligonucleotide of any one of claims 45-48 wherein the oligonucleotide comprises one or more 2′-MOE nucleosides.

50. The oligonucleotide of claim 49, wherein the 5′ wing region or the 3′ wing region comprise one or more 2′-MOE nucleosides.

51. The oligonucleotide of claim 49 or 50, wherein the 5′ wing region or the 3′ wing region comprise two, three, four, or five 2′-MOE nucleosides.

52. The oligonucleotide of claim 51, wherein every nucleoside of the 5′ wing region or the 3′ wing region is a 2′-MOE nucleoside.

53. The oligonucleotide of claim 49, wherein the central region comprises one or more 2′-MOE nucleosides.

54. The oligonucleotide of claim 53, wherein the central region comprises two, three, four, five, six, seven, eight, nine, or ten 2′-MOE nucleosides.

55. The oligonucleotide of claim 54, wherein every nucleoside of the central region is a 2′-MOE nucleoside.

56. The oligonucleotide of any one of claims 49-55, wherein the one or more 2′-MOE nucleosides are linked through phosphorothioate internucleoside linkages.

57. The oligonucleotide of claim 33, wherein the oligonucleotide comprises sugar modifications in any of the following patterns: eeeee-d10-eeeee, eee-d8-eee, eee-d10-eee, eeee-d10-eeee, and eeee-d8-eeee, wherein e=2′-MOE nucleoside and d=a deoxyribonucleoside.

58. The oligonucleotide of claim 57, wherein the oligonucleotide comprises internucleoside linkages in any of the following patterns: sssssooooooooosssss; ooooosssssssssooooo; oooooooooooooosssss; soossssssssssssssss; ssssssssssssssssoos; sssssoooooooooooooo; sssssssssssssssssss; sssooooooosss; ooosssssssooo; sssssssssssss; sosssssssssos; sosssssssssss; sssssssssssos; ssssssssssooo; ooossssssssss; sssooooooooosss; ooosssssssssooo; sssssssssssssss; ssssssssssssooo; ooossssssssssss; sosssssssssssos; sosssssssssssss; sssssssssssssos; ssssooooooooossss; oooosssssssssoooo; sssssssssssssssss; sssssssssssssoooo; soosssssssssssoos; soossssssssssssss; ssssssssssssssoos; oooosssssssssssss; ssssooooooossss; oooosssssssoooo; sssssssssssoooo; oooosssssssssss; soosssssssssoos; soossssssssssss; ssssssssssssoos; or sssssssssssssss; wherein s=a phosphorothioate linkage, and o=a phosphodiester linkage.

59. The oligonucleotide of claim 57 or 58, wherein the oligonucleotide comprises sugar modification and internucleoside linkage combinations, respectively, in any of the following patterns: ssssooooooooossss
a) eeeee-d10-eeeee and sssssooooooooosssss;
b) eeeee-d10-eeeee and ooooosssssssssooooo;
c) eeeee-d10-eeeee and sssssssssssssssssss;
d) eee-d8-eee and sssooooooosss;
e) eee-d8-eee and ooosssssssooo
f) eee-d8-eee and sssssssssssss;
g) eee-d10-eee and sssooooooooosss;
h) eee-d10-eee and ooosssssssssooo;
i) eee-d10-eee and sssssssssssssss;
j) eeee-d10-eeee and ssssooooooooossss;
k) eeee-d10-eeee and oooosssssssssoooo;
l) eeee-d10-eeee and sssssssssssssssss;
m) eeee-d8-eeee and ssssooooooossss,
n) eeee-d8-eeee and oooosssssssoooo,
o) eeee-d8-eeee and sssssssssssssss,
wherein e=2′-MOE nucleoside and d=a deoxyribonucleoside, and wherein s=a phosphorothioate linkage, and o=a phosphodiester linkage.

60. The oligonucleotide of any one of claims 33-59, wherein the oligonucleotide comprises at least one modified nucleobase.

61. The oligonucleotide of claim 60, wherein the 5′ wing region or the 3′ wing region comprises the at least one modified nucleobase.

62. The oligonucleotide of claim 60, wherein the central region comprises the at least one modified nucleobase.

63. The oligonucleotide of any one of claims 60-62, wherein the at least one modified nucleobase is 5′-methylcytosine, pseudouridine, or 5-methoxyuridine.

64. The oligonucleotide of any one of claims 60-63, wherein every cytosine in the 5′ wing region or the 3′ wing region is a 5′-methylcytosine.

65. The oligonucleotide of any one of claims 60-64, wherein every cytosine in the central region is a 5′-methylcytosine.

66. The oligonucleotide of claim 33, wherein the oligonucleotide comprises sugar modification and internucleoside linkage combination of:
eeeee-d10-eeeee and sssssssssssssssssss, wherein e=2′-MOE nucleoside and d=a deoxyribonucleoside, and wherein s=a phosphorothioate linkage,
wherein each cytosine of the 2′MOE nucleosides is a 5-methylcytosine.

67. The oligonucleotide of any one of the preceding claims, wherein the oligonucleotide further comprises a conjugate moiety.

68. The oligonucleotide of claim 67, wherein the conjugate moiety is a cholesterol conjugate located on the 3′ end of the oligonucleotide.

69. A pharmaceutical composition comprising the oligonucleotide of any one of claims 1-68, or a pharmaceutically acceptable salt thereof, and a pharmaceutically acceptable excipient.

70. A method of treating a neurological disease in a patient in need thereof, the method comprising administering to the patient an oligonucleotide of any one of claims 1-68 or a pharmaceutically acceptable salt thereof, or a pharmaceutical composition of claim 69.

71. The method of claim 70, wherein the neurological disease is selected from the group consisting of amyotrophic lateral sclerosis (ALS), frontotemporal dementia (FTD), ALS with FTD, Alzheimer's disease (AD), Parkinson's disease (PD), Huntington's disease, Brachial plexus injuries, peripheral nerve injuries, progressive supranuclear palsy (PSP), brain trauma, spinal cord injury, corticobasal degeneration (CBD) and/or neuropathies such a chemotherapy induced neuropathy, Spinocerebellar ataxia (SCA), Niemann-Pick disease type C (NPC), Charcot-Marie-Tooth Disease (CMT), Mucopolysaccharidosis type II (MPSIIA), Mucolipidosis IV, GM1 gangliosidosis, Sporadic inclusion body myositis (sIBM), Henoch-Schonlein purpura (HSP), or Gaucher's disease.

72. A method of increasing autophagy in a cell, the method comprising exposing the cell to a PPM1A inhibitor.

73. A method of increasing TBK1 ser172 phosphorylation in a cell, the method comprising exposing the cell to a PPM1A inhibitor.

74. A method of increasing TBK1 function in a cell, the method comprising exposing the cell to a PPM1A inhibitor.

75. A method of inhibiting PPM1A in a cell, the method comprising exposing the cell to a PPM1A inhibitor.

76. A method of inhibiting RIPK1 activity in a cell, the method comprising exposing the cell to a PPM1A inhibitor.

77. The method of any one of claims 72-76, wherein the cell is a cell of a patient in need of treatment of a neurological disease.

78. The method of claim 77, wherein the neurological disease is selected from the group consisting of amyotrophic lateral sclerosis (ALS), frontotemporal dementia (FTD), ALS with FTD, Alzheimer's disease (AD), Parkinson's disease (PD), Huntington's disease, Brachial plexus injuries, peripheral nerve injuries, progressive supranuclear palsy (PSP), brain trauma, spinal cord injury, corticobasal degeneration (CBD) and/or neuropathies such a chemotherapy induced neuropathy, Spinocerebellar ataxia (SCA), Niemann-Pick disease type C (NPC), Charcot-Marie-Tooth Disease (CMT), Mucopolysaccharidosis type II (MPSIIA), Mucolipidosis IV, GM1 gangliosidosis, Sporadic inclusion body myositis (sIBM), Henoch-Schonlein purpura (HSP), or Gaucher's disease.

79. The method of any one of claims 72-75, wherein the exposing is performed in vivo or ex vivo.

80. The method of any one of claims 72-79, wherein the exposing comprises administering the PPM1A inhibitor to a patient in need thereof.

81. The method of any one of claims 72-80, wherein the PPM1A inhibitor is administered topically, parenterally, intrathecally, intracisternally, orally, rectally, buccally, sublingually, vaginally, pulmonarily, intratracheally, intranasally, transdermally, or intraduodenally.

82. The method of claim 81, wherein the PPM1A inhibitor is administered intrathecally.

83. The method of any one of claims 72-82, wherein a therapeutically effective amount of the PPM1A inhibitor is administered.

84. The method of any one of claims 77-78 or 80-83, wherein the patient is a human.

85. The method of any one of claims 72-84, wherein the PPM1A inhibitor comprises the PPM1A antisense oligonucleotide of any one of claims 1-68, a pharmaceutically acceptable salt thereof, or a pharmaceutical composition of claim 69.

86. The pharmaceutical composition of claim 69, wherein the pharmaceutical composition is suitable for topical, intrathecal, parenteral, oral, pulmonary, intratracheal, intranasal, transdermal, rectal, buccal, sublingual, vaginal, intracisternal, or intraduodenal administration.

87. Use of a PPM1A inhibitor in the manufacture of a medicament for the treatment of neurological disease.

88. The use of claim 87, wherein the neurological disease is selected from the group consisting of amyotrophic lateral sclerosis (ALS), frontotemporal dementia (FTD), ALS with FTD, Alzheimer's disease (AD), Parkinson's disease (PD), Huntington's disease, Brachial plexus injuries, peripheral nerve injuries, progressive supranuclear palsy (PSP), brain trauma, spinal cord injury, corticobasal degeneration (CBD) and/or neuropathies such a chemotherapy induced neuropathy, Spinocerebellar ataxia (SCA), Niemann-Pick disease type C (NPC), Charcot-Marie-Tooth Disease (CMT), Mucopolysaccharidosis type II (MPSIIA), Mucolipidosis IV, GM1 gangliosidosis, Sporadic inclusion body myositis (sIBM), Henoch-Schonlein purpura (HSP), or Gaucher's disease.

89. The use of claim 87 or 88, wherein the PPM1A inhibitor is the PPM1A antisense oligonucleotide of any one of claims 1-68.

90. A method of treating a neurological disease in a patient in need thereof, the method comprising administering to a patient in need thereof a therapeutically effective amount of a pharmaceutical composition comprising a PPM1A inhibitor, and a pharmaceutically acceptable excipient.

91. The method of claim 90, wherein the neurological disease is selected from the group consisting of amyotrophic lateral sclerosis (ALS), frontotemporal dementia (FTD), ALS with FTD, Alzheimer's disease (AD), Parkinson's disease (PD), Huntington's disease, Brachial plexus injuries, peripheral nerve injuries, progressive supranuclear palsy (PSP), brain trauma, spinal cord injury, corticobasal degeneration (CBD) and/or neuropathies such a chemotherapy induced neuropathy, Spinocerebellar ataxia (SCA), Niemann-Pick disease type C (NPC), Charcot-Marie-Tooth Disease (CMT), Mucopolysaccharidosis type II (MPSIIA), Mucolipidosis IV, GM1 gangliosidosis, Sporadic inclusion body myositis (sIBM), Henoch-Schonlein purpura (HSP), or Gaucher's disease.

92. The method of claim 90 or 91, wherein the PPM1A inhibitor is the PPM1A antisense oligonucleotide of any one of claims 1-68, a pharmaceutically acceptable salt thereof, or a pharmaceutical composition of claim 69.

93. The method of any one of claims 90-92, wherein the pharmaceutical composition is administered topically, parenterally, orally, pulmonarily, rectally, buccally, sublingually, vaginally, intratracheally, intranasally, intrathecally, intracisternally, transdermally, or intraduodenally.

94. The method of any one of claims 90-93, wherein the pharmaceutical composition is administered intrathecally.

95. The method of any one of claims 90-94, wherein the patient is human.

96. A PPM1A antisense oligonucleotide of any one of claims 1-68, or a pharmaceutically acceptable salt thereof, for use as a medicament.

97. A PPM1A antisense oligonucleotide of any one of claims 1-68, or a pharmaceutically acceptable salt thereof, for use in the treatment of a neurological disease.

98. The PPM1A antisense oligonucleotide for use of claim 96 or 97, wherein said neurological disease is selected from the group consisting of amyotrophic lateral sclerosis (ALS), frontotemporal dementia (FTD), ALS with FTD, Alzheimer's disease (AD), Parkinson's disease (PD), Huntington's disease, Brachial plexus injuries, peripheral nerve injuries, progressive supranuclear palsy (PSP), brain trauma, spinal cord injury, corticobasal degeneration (CBD) and/or neuropathies such a chemotherapy induced neuropathy, Spinocerebellar ataxia (SCA), Niemann-Pick disease type C (NPC), Charcot-Marie-Tooth Disease (CMT), Mucopolysaccharidosis type II (MPSIIA), Mucolipidosis IV, GM1 gangliosidosis, Sporadic inclusion body myositis (sIBM), Henoch-Schonlein purpura (HSP), or Gaucher's disease.

99. A Protein Phosphatase 1A (PPM1A) antisense oligonucleotide selected from the group consisting of:
a PPM1A antisense oligonucleotide comprising the nucleotide sequence of any one of SEQ ID NOs: 2-955, SEQ ID NOs: 1910-2863, SEQ ID NOs: 2868-2913, and SEQ ID NOs: 2914-2959, or a pharmaceutically acceptable salt thereof,
wherein at least one nucleoside linkage of the nucleotide sequence is selected from the group consisting of: a phosphodiester linkage, a phosphorothioate linkage, an alkyl phosphate linkage, an alkylphosphonate linkage, a 3-methoxypropyl phosphonate linkage, a phosphorodithioate linkage, a phosphotriester linkage, a methylphosphonate linkage, an aminoalkylphosphotriester linkage, an alkylene phosphonate linkage, a phosphinate linkage, a phosphoramidate linkage, a phosphoramidothioate linkage, a phosphorodiamidate (e.g., comprising a phosphorodiamidate morpholino (PMO), 3′ amino ribose, or 5′ amino ribose) linkage, an aminoalkylphosphoramidate linkage, a thiophosphoramidate linkage, a thionoalkylphosphonate linkage, a thionoalkylphosphotriester linkage, a thiophosphate linkage, a selenophosphate linkage, and a boranophosphate linkage; and/or
wherein at least one nucleoside of the linked nucleosides is substituted with a component selected from the group consisting of a 2′-O-(2-methoxyethyl) (2′-MOE) nucleoside, a 2′-O-methyl nucleoside, a 2′-deoxy-2′-fluoro nucleoside, a 2′-fluoro-β-D-arabinonucleoside, a locked nucleic acid (LNA), constrained methoxyethyl (cMOE), constrained ethyl (cET), and a peptide nucleic acid (PNA).

100. The PPM1A antisense oligonucleotide of claim 99, wherein at least one internucleoside linkage of the nucleotide sequence is a phosphorothioate linkage.

101. The PPM1A antisense oligonucleotide of claim 100, wherein the phosphorothioate internucleoside linkage is in one of a Rp configuration or a Sp configuration.

102. The PPM1A antisense oligonucleotide of claim 99 or 100, wherein all internucleoside linkages of the nucleotide sequence are phosphorothioate linkages.

103. A pharmaceutical composition comprising the antisense oligonucleotide of any one of claims 99-102, or a pharmaceutically acceptable salt thereof, and a pharmaceutically acceptable excipient.

104. The method of any one of claims 70-71, 77-78, and 90-95, wherein the patient for treatment is identified by measuring the presence or level of expression of neurofilament light (NEFL), neurofilament heavy (NEFH), phosphorylated neurofilament heavy chain (pNFH), TDP-43, or p75^{ECD} in the plasma, the spinal cord fluid, the cerebrospinal fluid, the extracellular vesicles (for example, CSF exosomes), the blood, the urine, the lymphatic fluid, fecal matter, or a tissue of the patient.

105. The method of claim 104, wherein the patient for treatment is identified by measuring phosphorylated neurofilament heavy chain (pNFH) in cerebrospinal fluid (CSF).

106. The method of claim 105, wherein the pNFH in the CSF of the patient is used to predict disease status and survival in C9ORF72-associated amyotrophic lateral sclerosis (c9ALS) patients after initial administration and/or during on-going treatment.

107. A method of treating a neurological disease and/or a neuropathy in a patient in need thereof, the method comprising administering to a patient in need thereof a therapeutically effective amount of an oligonucleotide of any one of claims 1-68 or a pharmaceutically acceptable salt thereof, or a pharmaceutical composition of claim 69, in combination with a second therapeutic agent selected from a group comprising Riluzole (Rilutek), troriluzole, Edaravone (Radicava), rivastigmine, donepezil, galantamine, selective serotonin reuptake inhibitor, antipsychotic agents, cholinesterase inhibitors, memantine, benzodiazepine antianxiety drugs, AMX0035 (ELYBRIO®), ZILUCOPLAN (RA101495), dual AON intrathecal administration (e.g., BIIB067, BIIB078), BIIB100, levodopa/carbidopa, dopaminergic agents (e.g., ropinirole, pramipexole, rotigotine), medroxyprogesterone, KCNQ2/KCNQ3 openers, Pridopidine, PrimeC (combination of ciprofloxacin and Celebrex), lithium, anticonvulsants and psychostimulant agents, breathing care, physical therapy, occupational therapy, speech therapy, and nutritional support.

108. The method of claim 107, wherein the neurological disease is any one of amyotrophic lateral sclerosis (ALS), frontotemporal dementia (FTD), or ALS with FTD.

109. A method of treating a neurological disease and/or a neuropathy in a patient in need thereof, the method comprising administering to a patient in need thereof a therapeutically effective amount of an oligonucleotide of any one of claims 1-68 or a pharmaceutically acceptable salt thereof, or a pharmaceutical composition of claim 69, in combination with a second therapeutic agent selected from a group comprising Memantine, Rivastigmine, Galantamine, Donepezil, Aricept®, Exelon® (Rivastigmine), Razadyne®, Aducanumab, BAN2401, BIIB091 (gosuranemab), BIIB076, BIIB080 (IONIS-MAPTRx), Elayta (CT1812), MK1942, allogenic hMSC, nilotinib, ABT-957, acitretin, ABT-354, GV1001, Riluzole, CAD106, CNP520, AD-35, Rilapladib, DHP1401, T-817 MA, TC-5619, TPI-287, RVT-101, LY450139, JNJ-54861911, Dapagliflozin, GSK239512, PF-04360365, ASP0777, SB-742457 (a 5-HT6 receptor antagonist), PF-03654746 (an H₃ receptor antagonist), GSK933776 (an Fc-inactivated anti-β amyloid (Aβ) monoclonal antibody (mAb)), Posiphen ((+)-phenserine tartrate), AMX0035 (ELYBRIO®), coenzyme Q10, or any combination thereof.

110. The method of claim 109, wherein the neurological disease is Alzheimer's Disease.

111. A method of treating a neurological disease and/or a neuropathy in a patient in need thereof, the method comprising administering to a patient in need thereof a therapeutically effective amount of an oligonucleotide of any one of claims 1-68 or a pharmaceutically acceptable salt thereof, or a pharmaceutical composition of claim 69, in combination with a second therapeutic agent selected from a group comprising Levodopa, Carbidopa-levidopa, pramipexole, ropinirole, rotigotine, apomorphine, selegiline, rasagiline, entacapone, tolcapone, amantadine, trihexyphenidyl, BIIB054 (cinepanemab), BIIB094, BIIB118, ABBV-0805, zonisamide, deep brain stimulation, brain-derived neurotrophic factor, stem-cell transplant, Niacin, brain stem stimulation, nicotine, nabilone, PF-06649751, DNL201, LRRK2 inhibitors, CK1 inhibitors, isradipine, CLR4001, IRX4204, Yohimbine, coenzyme Q10, OXB-102, duloxetine, pioglitazone, preladenant, or any combination thereof.

112. The method of claim 111 wherein the neurological disease is Parkinson's Disease.

113. A method of treating a neurological disease and/or a neuropathy in a patient in need thereof, the method comprising administering to a patient in need thereof a therapeutically effective amount of an oligonucleotide of any one of claims 1-68 or a pharmaceutically acceptable salt thereof, or a pharmaceutical composition of claim 69, in combination with a second therapeutic agent selected from a group comprising UCB0107, ABBV-8E12, F-18 AV1451, BIIB092, C2N-8E12, tideglusib, deep transcranial magnetic stimulation, lipoic acid, tolfenamica acid, lithium, AZP2006, Glial Cell Line-Derived Neurotrophic Factor, NBMI, suvorxant, zolpidem, TPI 287, davunetide, pimavanserin, Levodopa, Carbidopa-levidopa, pramipexole, ropinirole, rotigotine, apomorphine, selegiline, rasagiline, entacapone, tolcapone, amantadine, trihexyphenidyl, BIIB054 (cinepanemab), BIIB094, BIIB118, ABBV-0805, zonisamide, deep brain stimulation, brain-derived neurotrophic factor, stem-cell transplant, Niacin, brain stem stimulation, nicotine, nabilone, PF-06649751, DNL201, LRRK2 inhibitors, CK1 inhibitors, isradipine, CLR4001, IRX4204, Yohimbine, coenzyme Q10, OXB-102, duloxetine, pioglitazone, preladenant, or any combination thereof.

114. The method of claim 113 wherein the neurological disease is progressive supranuclear palsy (PSP).

115. A method of treating a neurological disease and/or a neuropathy in a patient in need thereof, the method comprising administering to a patient in need thereof a therapeutically effective amount of an oligonucleotide of any one of claims 1-68 or a pharmaceutically acceptable salt thereof, or a pharmaceutical composition of claim 69, in combination with a second therapeutic agent selected from a group comprising Tetrabenazine, deutetrabenazine, physical therapy, risperidone, haloperidol, chlorpromazine, clonazepam, diazepam, benzodiazepines, selective serotonin reuptake inhibitors, quetiapine, carbatrol, valproate, lamotrigine, pridopidine, delta-9-tetrahydrocannabinol, cannabidiol, stem-cell therapy, ISIS-443139, nilotinib, resveratrol, neflamapimod, fenofibrate, creatine, RO7234292, SAGE-718, WVE-120102, WVE-120101, dimebon, minocycline, deep brain stimulation, ursodiol, coenzyme Q10, OMS643762, VX15/2503, PF-02545920, BN82451B, SEN0014196, olanzapine, tiapridal (tiapride), or any combination thereof.

116. The method of claim 115, wherein the neurological disease is Huntington's Disease.

117. A method of treating a neurological disease and/or a neuropathy in a patient in need thereof, the method comprising administering to a patient in need thereof a therapeutically effective amount of an oligonucleotide of any one of claims 1-68 or a pharmaceutically acceptable salt thereof, or a pharmaceutical composition of claim 69, in combination with a second therapeutic agent selected from a group comprising anticoagulants, antidepressants, muscle relaxants, stimulants, anticonvulsants, anti-anxiety medication, erythropoietin, hyperbaric treatment, rehabilitation therapies (e.g., physical, occupational, speech, psychological, or vocational counseling), or any combination thereof.

118. The method of claim 117, wherein the neurological disease is brain trauma.

119. A method of treating a neurological disease and/or a neuropathy in a patient in need thereof, the method comprising administering to a patient in need thereof a therapeutically effective amount of an oligonucleotide of any one of claims 1-68 or a pharmaceutically acceptable salt thereof, or a pharmaceutical composition of claim 69, in combination with a second therapeutic agent selected from a group comprising AXER-204, glyburide, 5-hydroxytryptophan (5-HTP), L-3,4-dihydroxyphenylalanine (L-DOPA), or rehabilitation therapies (e.g., physical therapy, occupational therapy, recreational therapy, use of assistive devices, improved strategies for exercise and healthy diets), or any combination thereof.

120. The method of claim 119, wherein the neurological disease is spinal cord injury.

121. A method of treating a neurological disease and/or a neuropathy in a patient in need thereof, the method comprising administering to a patient in need thereof a therapeutically effective amount of an oligonucleotide of any one of claims 1-68 or a pharmaceutically acceptable salt thereof, or a pharmaceutical composition of claim 69, in combination with a second therapeutic agent selected from a group comprising TPI-287, lithium, occupational, physical, and speech therapy, or any combination thereof can be selected as an additional therapy.

122. The method of claim 121, wherein the neurological disease is corticobasal degeneration.

123. A method of treating a neurological disease and/or a neuropathy in a patient in need thereof, the method comprising administering to a patient in need thereof a therapeutically effective amount of an oligonucleotide of any one of claims 1-68 or a pharmaceutically acceptable salt thereof, or a pharmaceutical composition of claim 69, in combination with a second therapeutic agent selected from a group comprising gabapentin, pregabalin, lamotrigine, carbamazepine, duloxetine, gabapentinoids, tricyclic antidepressants, serotonin-norepinephrine reuptake inhibitors, opioids, neurotoxin, dextromethorphan, nicotinamide riboside, auto-antibodies targeting neuronal antigens (TS-HDS and FGFR3), or any combination thereof.

124. The method of claim 123, wherein the neuropathy is a chemotherapy induced neuropathy.

125. A method of treating a neurological disease and/or a neuropathy in a patient in need thereof, the method comprising administering to a patient in need thereof a therapeutically effective amount of an oligonucleotide of any one of claims 1-68 or a pharmaceutically acceptable salt thereof, or a pharmaceutical composition of claim 69, in combination with a second therapeutic agent selected from a group comprising troriluzole, BHV-4157, or a combination thereof.

126. The method of claim 125, wherein the neurological disease is spinocerebellar ataxia.

127. A method of treating a neurological disease and/or a neuropathy in a patient in need thereof, the method comprising administering to a patient in need thereof a therapeutically effective amount of an oligonucleotide of any one of claims 1-68 or a pharmaceutically acceptable salt thereof, or a pharmaceutical composition of claim 69, in combination with a second therapeutic agent selected from a group comprising anti-seizure medications, speech therapy, physical therapy, occupational therapy, Adrabetadex, Arimoclomol, N-Acetyl-L-Leucine, or any combination thereof.

128. The method of claim 127, wherein the neurological disease is Niemann-Pick disease type C.

129. A method of treating a neurological disease and/or a neuropathy in a patient in need thereof, the method comprising administering to a patient in need thereof a therapeutically effective amount of an oligonucleotide of any one of claims 1-68 or a pharmaceutically acceptable salt thereof, or a pharmaceutical composition of claim 69, in combination with a second therapeutic agent selected from a group comprising physical and occupational therapies, orthopedic surgery, orthopedic devices, PXT3003, or any combination thereof.

130. The method of claim 129, wherein the neurological disease is Charcot-Marie-Tooth Disease (CMT).

131. A method of treating a neurological disease and/or a neuropathy in a patient in need thereof, the method comprising administering to a patient in need thereof a therapeutically effective amount of an oligonucleotide of any one of claims 1-68 or a pharmaceutically acceptable salt thereof, or a pharmaceutical composition of claim 69, in combination with a second therapeutic agent selected from a group comprising enzyme replacement therapy: idursulfase (Elaprase), surgical intervention (tonsillectomy and/or adenoidectomy), RGX-121 gene therapy, adalimumab, MT2013-31, or any combination thereof.

132. The method of claim 131, wherein the neurological disease is Mucopolysaccharidosis type II (MPSIIA).

133. A method of treating a neurological disease and/or a neuropathy in a patient in need thereof, the method comprising administering to a patient in need thereof a therapeutically effective amount of an oligonucleotide of any one of claims 1-68 or a pharmaceutically acceptable salt thereof, or a pharmaceutical composition of claim 69, in combination with a second therapeutic agent selected from a group comprising physical, occupational, and speech therapies, contact lenses and artificial tears, genetic counseling, or any combination thereof.

134. The method of claim 133, wherein the neurological disease is Mucolipidosis IV.

135. A method of treating a neurological disease and/or a neuropathy in a patient in need thereof, the method comprising administering to a patient in need thereof a therapeutically effective amount of an oligonucleotide of any one of claims 1-68 or a pharmaceutically acceptable salt thereof, or a pharmaceutical composition of claim 69, in combination with a second therapeutic agent selected from a group comprising anticonvulsants, physical and occupational therapies, galactosidase, gene delivery of galactosidase, LYS-GM101 gene therapy, or any combination thereof.

136. The method of claim 135, wherein the neurological disease is GM1 gangliosidosis.

137. A method of treating a neurological disease and/or a neuropathy in a patient in need thereof, the method comprising administering to a patient in need thereof a therapeutically effective amount of an oligonucleotide of any one of claims 1-68 or a pharmaceutically acceptable salt thereof, or a pharmaceutical composition of claim 69, in combination with a second therapeutic agent selected from a group comprising physical and occupational therapies, use of devices such as braces, walkers, wheelchairs, immunosuppressants, BYM338, or any combination thereof.

138. The method of claim 137, wherein the neurological disease is Sporadic inclusion body myositis (sIBM).

139. A method of treating a neurological disease and/or a neuropathy in a patient in need thereof, the method comprising administering to a patient in need thereof a therapeutically effective amount of an oligonucleotide of any one of claims 1-68 or a pharmaceutically acceptable salt thereof, or a pharmaceutical composition of claim 69, in combination with a second therapeutic agent selected from a group comprising corticosteroids, colchicine, dapsone, azathioprine, or any combination thereof.

140. The method of claim 139, wherein the neurological disease is Henoch-Schonlein purpura (HSP).

141. A method of treating a neurological disease and/or a neuropathy in a patient in need thereof, the method comprising administering to a patient in need thereof a therapeutically effective amount of an oligonucleotide of any one of claims 1-68 or a pharmaceutically acceptable salt thereof, or a pharmaceutical composition of claim 69, in combination with a second therapeutic agent selected from a group comprising enzyme replacement therapy, substrate reduction therapy, N-acetylcysteine, GZ/SAR402671, cerezyme, or any combination thereof.

142. The method of claim 141, wherein the neurological disease is Gaucher's disease.

143. The method of any one of claims 1-3, wherein the transcript comprises a sequence of SEQ ID NO: 2864 and is further transcribed from nucleotides 8,470-8,926, 44,991-45,990, 49,055-49,164, 50,647-50,704, and 51,703-58,336 of SEQ ID NO: 1.

144. The method of any one of claims 1-3, wherein the transcript comprises a sequence of SEQ ID NO: 2865 and is further transcribed from nucleotides 8,470-8,926, 9,629-9,730, and 44,911-47,804 of SEQ ID NO: 1.

145. The method of any one of claims 1-3, wherein the transcript comprises a sequence of SEQ ID NO: 2866 and is further transcribed from nucleotides 4,999-5,295, 49,055-49,164, 50,647-50,704, and 51,703-58,336 of SEQ ID NO: 1.

146. A method of treating a neurological disease in a patient, the method comprising selecting a patient for treatment with an oligonucleotide of any one of claims 1-68 or a pharmaceutically acceptable salt thereof, or a pharmaceutical composition of claim 69, wherein the patient for treatment is selected by a method comprising measuring a presence or level of expression of neurofilament light (NEFL), neurofilament heavy (NEFH), phosphorylated neurofilanent heavy chain (pNFH), TDP-43, or p75^{ECD} in the plasma, the spinal cord fluid, the cerebrospinal fluid, the extracellular vesicles (for example, CSF exosomes), the blood, the urine, the lymphatic fluid, fecal matter, or a tissue of the patient.

147. The method of claim 146, wherein the patient for treatment is identified by measuring phosphorylated neurofilament heavy chain (pNFH) in cerebrospinal fluid (CSF).

148. The method of claim 147, wherein the pNFH in the CSF of the patient is used to predict disease status and survival in C9ORF72-associated amyotrophic lateral sclerosis (c9ALS) patients after initial administration and/or during on-going treatment.

149. A method of treating a neurological disease in a patient, the method comprising selecting a patient for treatment with an oligonucleotide of any one of claims 1-68 or a pharmaceutically acceptable salt thereof, or a pharmaceutical composition of claim 69, wherein the method comprises:
determining whether the patient has a mutation in one or more ALS-associated genes selected from the group comprising TBK1, TARDBP, SQSTM1, VCP, C9orf72, FUS, and CHCHD10;
identifying the patient as a candidate patient for treatment according to the determination; and
optionally administering, to the candidate patient, the oligonucleotide of any one of claims 1-68 or a pharmaceutically acceptable salt thereof, or a pharmaceutical composition of claim 69.

150. A method of treating a neurological disease in a patient, the method comprising administering to the patient an oligonucleotide of any one of claims 1-68 or a pharmaceutically acceptable salt thereof, or a pharmaceutical composition of claim 69, wherein the patient for treatment is selected by a method comprising measuring a presence or level of expression of neurofilament light (NEFL), neurofilament heavy (NEFH), phosphorylated neurofilament heavy chain (pNFH), TDP-43, or p75^{ECD} in the plasma, the spinal cord fluid, the cerebrospinal fluid, the extracellular vesicles (for example, CSF exosomes), the blood, the urine, the lymphatic fluid, fecal matter, or a tissue of the patient.

151. The method of claim 146, wherein the patient for treatment is identified by measuring phosphorylated neurofilament heavy chain (pNFH) in cerebrospinal fluid (CSF).

152. The method of claim 147, wherein the pNFH in the CSF of the patient is used to predict disease status and survival in C9ORF72-associated amyotrophic lateral sclerosis (c9ALS) patients after initial administration and/or during on-going treatment.

153. A method of treating a neurological disease in a patient, the method comprising administering to the patient an oligonucleotide of any one of claims 1-68 or a pharmaceutically acceptable salt thereof, or a pharmaceutical composition of claim 69, wherein the patient is selected for treatment by a method comprising:
determining whether the patient has a mutation in one or more ALS-associated genes selected from the group comprising TBK1, TARDBP, SQSTM1, VCP, C9orf72, FUS, and CHCHD10;
identifying the patient as a candidate patient for treatment according to the determination.
